United States Patent Application Publication US 2017/0283862 A1 - sequence listing, part 5

SEQ ID NO: 2 - DNA, 5974109 bp, Klebsiella oxytoca KCTC 1686 (residues 1,991,371-3,982,740 of 5,974,109)
  misc_feature (5617061)..(5617061): n is a, c, g, or t
tgctgatggcgctgtcgtttatcttcggcccgctgcgtagcgtaccgatgggcgtcagagtggtgaccgggatcagcttcggctttatcttctacgtgctggaccagattttcggcccgctcaccctggtgtacggcattccgccgattatcggcgcgctgttgccgagcgccagcttcttcttgctgagcctctggctgatgatgcgtaaaacctgacgtcacgcgcccccttcctgaagtcagaaagggggctttttttagcgtttccgcccgccaagtaagcttcccagcattcccctgactatctggttggtgacctgacgcaccgcgctcctggccgccgtttgcacaatgccgtcgcgtttgccgccgcgcggcccggtggtgccgaacagaatgtctttgagcccgccgagcagaccgtcgtcatcgccgttttgctggccttttgcgggcggtgattgctgctgctccgttgtgctctgaacgccctgttgcagcatttcaaaggccgattcacggtcgatctcttcttcatattttccgtacagcgccgagtggttaagcagcccgttacgttcgtcatcggtgaccggccccatacgcgagcagggggcgataaccatcgcgcgttccactatcgaagggctgcctttctcatcaagaaaggagatcagcgcctcgccggtgcccagctcctggatcgcctgttcggtactgaacgcgggattcgcgcgcatggtctgcgcggcggtttttaccgctttttggtctttcggcgtgaaggcgcgcagggcgtgctgcacgcgattacccaactgaccgagaaccgcatcgggaatgtccgccgggttttgtgaaacaaaatagaccccgacggctttagaacgaatcaggcgaatgacctgctcgattttatccagcagcacctgcggcgcatcgttaaacagcagatgcgcttcatcaaagaaaaagaccagctttggcttctcctggtcaccggcctccggcaggcgttcgtaaagctcggagagcatccacagcaagctggcggcgtacagcttcggcatctggtaaagcttttcggcgctcaggatattaatcactcctttaccctcagcgtcgacgcgcatccagtcctggatatcgagcataggttcgccgaaaaagtgctccgcgccctgctgctccagggttaataatccgcgctgaatcgccccaacggaggcgctgctgatgttgccgtactggttctgaaacgctttggcgttgtcgccaatgtattgggttatggcgcgcaggtctttaaagtcgagcagcagcagcccgcgatcgtcggcgatacggaagatgatattcagcaccccagactgaacctcattgaggttgagcaggcgagccagcagcagcggcccgagatcggaaaccgtggcgcgaaccgggtggcctttttcgccaaaaatatcccatagcaccaccggattggcgtgcggctgccagtccgttgcgccgattttttccagacgcgcctgcagcttttccgaactttgtcccgactcggcgataccggtgaggtcgcctttcacatcggccataaataccggaacgccgatttccgagaaagactccgccagcttttgcagagtgacggttttaccggtccccgtggcgccggtaatcaagccgtggcggttggccatagcgggcagtaaatgcagctgtttatccagcgtgcgtgcaatcagcagaggtgagctcatgagcgatttctccatttatcctgctgcgagtataggcaacctgatagcaaaaggagggaaatcacgcacaccttcgcttattcacgtcaggcgcagtggcgctgaattaacgcgatgctctgttcgatttcgcggcggatatcgtcttcgctccagtttgccaattccggcgcgaagggttcgaacgcatacacgccctgatagccgcgcgcctccaggtttttgacctgctcgcagctttgcagctggtcttttgcggtcagcatgatgcgctcattgtcggtaagggcttcgcgcgggcgggaatcctctacgccggaaagatggaccagaccgatttcgccgatatccacctggttaaactcctgctccgcctgcggataaagatgatgatggaaggtatctatcagcagcttaaacggcacccgcgcgtcgtggatcagcgtttgcgcctgcgccgaggagcggagcgagctctgcgggaaaccgagcggctccaccagcccctgaataccgtagaaggcgaatagcggcgccaggtcacgcagggcgttaagggtttcgctcgccggaacctcggtaccatcgttcagcgggcacagcaccagcgatttggcgccaacggctttggcttctttcagcaatgactccgtcaggctacgaacctctgcggtgcggcagttgaaggggtagaccgcattgatagtgaggatctcaatatggtagcggtcagccagctctcgcacctgctggtggctcaggtcgtcggttacttttccgctggggaggtcgttacgtagctcgactttgttcaaccccaggctgttcaccagccggaaaaaggcctcaatgctgagtgacggggcgatcttgcggttgatgcagaaacgttgcgatgcaatagccattttgactctccagaaatgtagggatcggattcgttcgaatacctcatagtcaaaacatttattccaaaattagcaatgtatgaaatggtgattttttgagccgactcgcaaaatatttttctgctgcgttttaaagagcacgggttgcaggtggcgctaaatctcaactctttttatcgtgctttagtccgcaagccggcaatttcttacacgaaattgcgaccatcatcaccaaaatagaatttcactagctatcaatattgaaatattaatttcattttactacggttacagcacagcagatccagtaatgggccgtactgcgttggcccccgataccccatacagatgaggcgagagcatgactatcacaggaaactttattggcgggaaaaccgttaccagcggcagcagcaaaacaatgccggttttcgaccccgcgacgggcaaagtggtccgcgaagtcacgttatcgaccgcgcaggaagtctctgacaccattcaggtggcgcgtgatgcttttgaaagctggtcgcgcaccacgccgctgcgccgcgcccgcgtgatgttcaattttaaaatgttactggaacagcacgctgaagagctggcggggattatcgtcagcgaacacggtaaagtgttttccgacgcgatgggggagctgacgcgtggcatggaagtcgttgagtttgcctgcggtattccgcacctgatcaaaggggagttctcatcggatgtcggcaccggcgttgatagctattctctgatgcagccgctgggcgtggtagcgggcattacgccgttcaacttcccggcgatggtaccgatgtggatgttcccgctggcgctggcctgcggcaacagctttgtcctgaagccgccagcgctggcgcctactgccgcggtgcgtctggcggaattgctgaaagaagcgggtctgccggatggcgtctttaacgtcgtgcactgcagcaacgaagatgccgagcagctataccgggacccgcggatcgcggcggtaagctttgtcggatcttccggcgtggcggagcatatttataaaaccgccagcgcttatggcaagcgggtacaggcgtttggcgcggcgaaaaaccacgcgattgtgatgccggatgccgatcttgatgccaccgtgaatgccattatgggcggcgcgttcggctcggcgggcgagcgctgcatggcgctgccggtggtggtcgccgtgggtgatgaaacggcggataaactgattgcgcgcctgaagccgctggtggaatccctgaaggttgggccgggctgtatgcgcggaaaagaagagaacgaaatggggccggtcgtctccgatacccatcagaaaaaagtgctgggatatattgataaaggggtcagcgagggggcgacgctggtggttgacggacgcaagccgcaggtgcgcgggtttgaagagggatactacgtcggcggaacgctgttcgacaacgtcacgccggagatgactatctggcgcgaagagatttttggcccggtgctggggattgttcgcgtggcggattaccacagcgcgctggagctggtgaacagccatgagttcggcaacggtagcgccgtctttaccagcaacggccacaccgcgcgtgaatttgtccatgatgtccaggccggaatggttggggtcaacgtaccggtacccgttcccatggccttccatagctttggcggctggaaacgctccgtattcggcgcactgaacgtccatggcccggacggcgtgcgcttctatacgcgtatgaaaaccgccaccgtccgctggccgcagggtcagcaaaccgtatctgaattcagtatgccgacgttaggctaatcggcgaaggagagcgccatgtctttactggctaaagcaaaaaaagaagggcagattcagcacatcaccccgcagagcgcggggtggaagtacattggttttgatgtctggatgttaaagaaagggcaaaccgtcaccctggaaagcggcgatcgcgaactgtgcctggtgctggttgccggcctggcttcggtaaaaaccacgcaggcggatttcccgaacctcggccagcgtatgtcgccgtttgagcggacgccgccctggtcagtctacgtgccgccgcaggataaagtcgaagtgacggcagattctgacctcgagctggccgtatgcagcgcgccgggtaaaggaaccttccctgcacgggttatctccccgcaggacgtgggcgtagagcatcgcggtaaagggcgtaaccagcggctggtgcacaatattctgccggatagcgcgcaggcggactgcctgctggtggtggaggtttacactgacgaaggggcgaccagctcatggccgtcgcacaagcacgatacggcgctgccgggacaggaaacccagctggaagagacctactaccaccgtttcgatccgccgcagggttttgccttccagcgcgtctacaccgatgaccgcagccttgatgcctgtatggctccctacaaccacgatgtggtcatggtgccgcgcggctaccatccggtggcggcgattgccggatatgacagctactatctgaacgtgatggccggcccggatcgcaaatggatgtttacctgggaagaggatcacgcgtggatcaatagccctgattatccccgccacgattagcatcggttgaggataaaaaggccggttagccatgcttaccggcctttttgatcctgttacccgaataagatcgtcgtcgcaattctgccacatccccggctcgcgctgcgcttagccgggctactggtttaccgtcgtctgcggacaagtagcccggataagacgtgtacatcgccatccgggagtcatgaaaaacttaagccagctgcaccccggctcgcgctgcgcttagccgggctacgggtttaccgtcatctgcggacaagtagcccggataagacgtttacgtcgccatccgggaggcatgaaaaatttaagccagctgcaccccggctcgcgctgcgcttagccgggctacgggtttaccgtcgtctgcggacaagtagcccggataagacgtttacgtcgccatccgggaataatgaaaagcttaagccagctgcaccccggctcgcgctgcgcttagccgggctacgggtttaccgtcgtctgcggacaagtagcccgggtaagacgtttatgtcgccatccgtaggcatgaaaaatttaagccagctgcaccccggctcgcgctgcgctcagccgggctacgggtttatcgtcgtctgcggacaagtagcccggataagacgtttacgtcgccatccgggaggcatgaaaaatttaagccagctgcttcgtctctgcatctttgctgctgttcagcgccagcgagaccgccagcgtctgggccaggcacagcgaggccacctgcgagcggaaaccatcaacctgcgcctcgcgcaccacaaagcagacgtcgctgaaggccgccagcgggctgacctggctgtcggtaatcgctatctgtcgtgctttacgctgcgcgccgagctccaccagttcaaccacttcccgagcatacggagagaagctcaccgccaccacgacatctttcggcccgaccaggctcagctgctcggtaaacatgccgcccagaccgtcaatcaggaacgctttacggtccagatggcgcagggcgtaggtcagataggaggcgacactaaaggagcggcgcaggccaataacgtagatattctccgcttccgccagcagcgcgaccgcgcgctgcagatcgtcgccggaggtctgcatcgccagctgctgcagcgcctgggtattgaccatggtgaacatattcaggatttcggtcggcgtttccggcggggttgcgtcatccgtcgtggtctggcggaacagacgcgcgcgctcggtatagttagccgtctcttccatcagatgctgcttgaacatctgcttcatttcgttgaagccgctaaaaccaaaggcgttagcgaagcggatcagcgtggaaggggggacgtcagcttgttgcgcgatagaggccacggtgtcgaaagccacgctattgctgttatcgagaatatagcgggctacctgtttcaggcgtttgcttaacgtgtcgtagcgacgcctgatttcatcctgcaagatggtaagttgggtcggattattggccatagattgcgctctgagaaaatgaaaggaatataatttccagtgtatcaaatgaagcgaatttttcatttactacgatgaaatacgcgattcatttcacgaagatccagaaaaaagcccgcatcttctgaagaggatgcgggcctgggcggaatcagccgcgggcttctcgccagtagccgatgagcgtgaggtagttgcgtttcacttcgttaatcagcgcctcgtcgctgagctctccctgcatccagcgccgtgaaggctggccaaaaatggtgcgtcctacggcaaaacctttgatcatcggatgcttcgccgcttcggcaaaaccggcgcgcagacggtccgaaggagcgtccaggccgaggattaagatcccgcggcaccagctatcttcgcgcgcgatcagtttgccaatcctttcccattccgcgctcgacagcggcggcagcttccaccagtccggctgaatgcccagctgatagaagtgctccagcatgtcgtggtagtggcgttcatctttatccgggccgttttccggcaggatgatttccagcagcagctcatgcccggacttgttgcacgcctgccagacctccagcagcagcgcatcctgttcggcgcgcagctcggccggatcggccggatgatagaagaccaggcatttcaccacgtgctccagcggccagtcgatcagttgggaaccgatgttgccgtgttccagacgcagcgggcgcgagctcggcatttcaatcggtcgaccaatccaccagcccttgccggtgatagcattgagcgagcgctggccgtaggtgccatcggcgaggatgccgctgcgaccgtcaagaccggcttcgtctgcggcggcttccgcggccgccagcagcagcagcttcagctgcggaatgcaggattcatcacgcccggtttccagcgccagatctgccagctgtttacggtggtcaaaggcgaaaatgcacagctccggccatgcctggcggcggctggtgacgcgatggagatggttgagacgatcgtcgatatccggacgcggcaccgattctgcccgcgacagatagtcgtcaagctcggctttggtcggcattgcgggcgcgcagccgtggcgtgaaaccaccagcgcgccgcaggcgttagcgtagcggcaggcctgctcccagccttcatcgttaagccagccgcgcagcagcccggacataaaggcatcgcccgcgcccaggacgttaagcacgtctacgcgtacgccctgctgcagcggcacgctatcccagctgtcgggaatagcgccttccagcaccacgcagcccatcggaccgcgcttgcaaaccagcgtcgctttcgtggcgttacgcacgtttttcagcgcggtcagggtatcagtgctgccgccggcaatatgaaactcctcttctgtccccaccactaaatcgaacagatgcaggacttcctgcagctggctggtcacctggccggattcaatgaaacgcgtttcaccgtcgcctaaagacgttaacccccaaagcaccggacgatagtcgatatccagcgcggtacgcaggccgtgacggcgggcgtactccagcgccttcagcaccgcttcgcgcgtgttggcgtgcgaaaggtgggtgccggttaccgccagcgcccgggaagaggcgatgtactcttccttaatatcttctggcgaaagggccatatcggcgcagttatcgcggtaaaaaatcagcggaaacgtctcctgatctttaatccccagcatcactaacgccgtcaggcgctgcttatcggtgatcagatattcggtatcgacgccggcgcggctcagggtttcgcgtagaaaacgaccattatgctcatcgcccacgcgagcgagcattgccgattttaatccttgaatggcggtgccgaaggcgacgttgccggaagagccacccaggtatttagaaaaactggcgacatcttccagcctcgcgccaatctgctgggcatagagatcgactgccacccggccaatacagatgacgtcgagtcgctttactgctgcattcatagctagggtttccttttgcatttctgctgtacggaagagtcgggataccgacagcgtctccgaaaacagcctgagggttattggttatctctagtttgagaaataaatatttcatttgcaaactagatcgaaattaaaaaaccaaaaatgtgagggatataccactatgccgcgctgagcctcattctgcctcggatcctgggctgcggctgaaagttgaaccagagcccgtttagatgcggtctttacctatgatttttaaggggatattaagaggtgggccgcgtaatttgcgcgttatcccgtatacaggatgcgaatgaaacgggtgaaatgcatagagagtttgatcgctctcgcaaaatgaaatattttttctgtatttttatttaatgaaaaaaatgtttgcctataatccagaagtattccagtgacgttaacgatttccctgactcatcgctgtatcgctgggcagggcaaaacgcgaacccacacgcaaatactgaacaataaggattgggcaacatgggcaaactgagactgacaatggcgcaggcgctggtgaagttcctggataaccagtacctggaagtcgatggcgaagagcataagttcgtcaaaggcatctttgctatctttggccacggcaacgtgctgggaatgggtcaggcccttgaacaagatagcggtgaaatgcgggtctatcaggggcgtaacgagcaagggatggcgcatgtcgccaccggttttgccagacagtccctgcgtcgtcagattattgcctgcacctcctccattggccccggcgcggcgaacatgattaccgctgccgccaccgcgaccgccaaccgcatcccgctgctgctgctgccgggggatgtgtttgcgacccgccagcctgacccggtgctgcagcaaatcgaacagagccacgatctcagcattaccactaacgacgcgtttcgcgcggtgagtaaatactgggatcgtatcacccgtccggaacagctgatgagcgcctgtatcaacgccatgcgcgtattgaccgacccggcggaaaccggtgcggtcacgctctgtctgccgcaggatgtccagggcgaagcctgggattatccggaatccttctttacccgccgggtacaccgccttgaccgccgcccggccagcgccgcgcagctggcggatgccgtggcggcgattaaagccagccgtaagccgctgatcgtctgcggcggaggggtgaaatactccggcgccggcgaggcgttgacccgttttgccgagcgctacggcgtgccgtttgccgaaacccaggcgggtaaaggcagcgttgtctcttcgcatccgtataacgtgggcggcgtcggcgaaaccggctgcctggcggcgaacctgctggcgaaagaggcggatctggtcatcggtctcggcacgcgtttcagcgatttcaccacctcgtcaaaatggattttccagcacccgggcgtgcgcttcctcaatattaacgtcagcaacttcgacgcctggaagctggatggcatcccgatgctggcggatgctcgcgaagccctcaccgccctggacgacgccctgtccggcgaatcctggcaggctggctggggcgagcaaattgaaagcgtacagagccgccagctgaaagagacccagcgcgtttaccaggcggtgtggcaggaaaccgctttcgtcccggaaatcgacgaccatctggatcgggaatcggtgtatcgcgaatttcgtcagataaccgactctaccctgacgcaaagcagcgtccttggcgtactcaacgaaacgctgccggcggatgcggtgattgtggcggcggcgggtagcctgccgggagacctgcagcgcgtctggcgcaaccgggccaccaacacctatcacgtggaatacggctactcctgcatggggtacgaagtcagcgccgcgctgggcgtgaagttagcccaaccgcaaagcgaggtctattcgctggtcggcgacggctcgttcatgatgctgcactccgagctggtgacctccctgcaggagcgcgcgaagatcaacatcgtgctgctcgacaacatggccaacggctgcattaacaacctgcagatggagcacggtatggacagcttcggcaccgagttccgcttccgctgcgccgaatcgggccagctgcagggcggcctggtgccggtagatttcgccaccgtcgctgccggctacggctgcaaaacctggcgcgtcacgacgctagaagaactacgccacgcgctggacgccgcacgccgcgaaaccgtcagcaccctgatagacattaaagtgctgccgaaaaccatggtgcacaaatacggcagctggtggaacgtcggcgtcgcgcagtctgcgctctccgagcggatccgcaaggtggcgcaaatgatcaatgaaaaacgcgctcaggcgcgggattactaaaacagaacacaaaccctgaaccctacaaatctcgggagaaaaccaactatgtcactcaaattaggtgtcatcggtgccggcgctatcggtaaagagcatatccgtcgttgcactcaggtactgcagggagccacggtagtggcggtttcggatatcaacgaagagaacgcccgcgccgcggttgcgctgccgggcgtgcatgccgaagtgtacgccgacggtcatgacgtgattaaggccagcgatgtggacgctattctggtcacctcatgggaccccacccacgaagagtacaccctggccgccatcgctgccgggaagccggtgttctgcgagaagccgctggcgatgagcgcggaaggctgccgccgcatcgttgatgcggaaatgaaggccggtcgccgcctggtgcaggttggatttatgcgcccttacgacgaaggctatctggcgctgaaaaaagtgatcgatgacggcgatatcggcgcgccgctgatgctgcgctgcgcgcaccgcaaccagtcggtgggtgaggattacatcaccaacatggcgatcaccaacaccctgattcacgaactggacgttctgcgctggctgctgaatgacgactatgtttccgtgcaggtgcgcttcccgcgctccacgtcccacacccacgcgcgcctgaaagacccgcagatcgtgtcgtttgaaaccaaaaaaggcacgctgatcgacgtggaagtcttcgtgaactgccagtacggctacgacatccagtgtgaagtggtaggggaaaccgggattgcccgcctgcctgagccgtcggctgtgcagatgcgcaaagccgctaacctgtcgaccgctatcctgaccgactggaaggatcgctttatcaaagcgtatgacgttgaactacaggcctttatcaatgatgttcaggccggccagctgcacggcccatcggcgtgggatggctacgcggcgtccgttgctgccgacgcctgtatcaaagcccaggaaaccagcgagccggttgaggtgacgctgccggaatgcccggcattctacaaacgttaatcccgctttgctgacggaacttctttgcacaggtaacgacgatgaaaattgcttttgacgttgatgtcattaaagacctcggggtaacccgaatggtccatcaggtggcggagtggggctacaagtacattgagcaatcgccgcacccgcagatcaacccgttctacaagcacccgcgcgccagccgggaaattatggctgagtacaagcaggcgctgcgcgataccggcgtggagctctcctcgtttatctgcgtctaccgctggtccggtccggatgagctgcgccgtcaggcggcagtgaaaaactggaaacggctgatcgaaatcgcggttgaaatgggtgttcaggtgatcaacaccgagttctccggcgatcctaaccagccggagatttgcgatgagatgttctatcgctccatggaagagctgctgccgatttttgagcgcgaaggcatccgcgttgaaattcaggcacatccgtgggacttctgcgaagagaacaacgaaaccgtcgatatcgtgaagtcgttccgcagcgataacgttaagtacgtttacagcgtcccgcatacctttttctatgacaaaggcgtgggcgacgttgagaagatgctgcgctacgcgggaagcgatctctcccatgtgctgatcgcggatacccgcaaccatacaaaacactgccgctatatcgttaacccaccgggcgtagatgccgtcgttcaccagcacgtgggcgtcggagaaggggatgttgatttcgacgcgctgttccgcaccctgcgcgatatgaaatttgccgagcagaccttcaaggtcggcggtgagccgattgtggccacctcgctgttcggctacccggaaaagatgaaataccaggcagtggaaacccgtgaactcatcgaacgtgaattgctgcgccggtaaggcgcagcggcaggagccccctactatgaacaaagataacgtaaaactggctatcgccccgattggctggactaacgacgatatgccggagctgggcagcgagaatactttccagcaaatcgtcagcgaaatggcgctggcgggctttaccggcagcgaagtcggcagcaaatatccacgcgatccggcggttctcaagccgatgctggatatccgcggcattcagatttgcaacgcctggttcagcaccttttttgctaacggccagcgggaaaagaccattgatgaattcgttaaccacatgaatttcctgcatgctatgggcgcgaaagtgatcggctgctctgagcagagcggcagcatccaggggctggaaaagcccatcctggagaatgcgaaaccgtgctttagcgaagaagagtggcagcgggtggcggaaggctataacaccctcggtcgtctggcggcggaaaagggcatgcaggtttgtctgcaccaccatatgggcaccggtatccagacgacggcagagatcgacaagtttatgtcgctggtggatgacaaagtcttcctgctctacgacaccggacacgcctggtattccgaaggcggcgaagagccgatgctggcgattctgaaaaaatatctgccgcgcattaaccacgtgcacctgaaagacgtgcgtccgccggtgatcgagcaggtgcgtcgcgaagggctctccttcctggacggcgtgaagaaggggaccttcaccgtgccgggcgacggcgtcattgatttccgtccggtgttcaagctgctggacgagcatggctataaaggctggatggtggttgaggccgagcaggatccggcgctggccaacccattcgaatatgccgtaaaagcgcgcaaatatatccgcgagacggcaggaatctaatcgttgttttattttcaggccatacgtcgtatggcctgctttttttaccccatcactcagcagtagctcaagacgtagaacgaaaacaacacgtcggtgaggcctcggcctctgcattcagactagagcaaatcttccctcaaacaaggcgggttactggagtctattatgtctaaggaacaataccttacactcaataaagcgtcgggaccgaatagcgagaccccgacaacgccctttgtaaaagttgtcgccctgatcgcgacgcttggcggtttactttttggctatgataccggggtgatttccggtgccttactctttatgggcaccgagcttcatcttactccctttaccaccggtctggtcaccagctcgctgctattcggcgccgcctttggcgcgctgctttctggcaatctggcgaatgcggcgggcagaaagaaaattattctgtggctggcggtgctttttgccatcggcgcgataggcacctctatggcgccggacgttaactggatgattttctttcgtcttattctcggcgtggcggtcggcggggcggcggccaccgttccggtctatattgccgagatagctcccgcgaataagcgcggacagctggttactttgcaggagctgatgatcgtatccggtcagctgctggcctatatttctaatgccacgttccatgaagtctggggcggggaaagcacctggcgctggatgctggcggtggcgacgctacccgccgtgctgctctggtttggcatgatgtttatgccggattcaccgcgctggtacgcgatgaaagggcgcctggcggaagcccgtcgcgtgcttgagcgcacccggcataaagatgatgttgagtgggagctgctggagatcaccgaaacgctggatgagcagcgcaatctcggtaagccccggttcagcgagattatgaccccgtggttgttcaagctgtttatgatcggtattggtatagcggttatccaacagcttaccggtgtaaataccattatgtactatgcccccacggtactgacctcggttggtatgactgataatgccgcgctgtttgccactatcgccaacggcgtagtctccgtattgatgacattcgttggcatctggatgcttggcaaaattggccgtcgcccgatgaccatgattggtcagtttggctgcaccgcttgcctggtctttatcggtgcggtcagctatctgctgccggagacggttaacggccagcctgatgcgctgcgcgcctatatggttctggcagggatgttactgtttctgagctttcagcagggggcgctatcgccagtgacctggctgctcatgtcggaaatatttccaacccgcctgcgcggtatttttatggggggggcggtattttcaatgtggattgccaacttcctgatctccctgttcttcccgatactgctggcgtggttagggctttcaggcaccttctttatcttcgccggtattggcgtatttggcgcgatattcgtaattaaatgcgtaccggaaacccgccaccgtagtcttgaacaaatcgagcactatctgcgggataagctggacaccagtgaagaagggcaggccgccagggcccggcgaataatggctgaatcgcaggcggataaagtgtaacgctgattgccaacggtatctgcaatgctggagcggtgctcagcggtctgcacggtccgggctaacgagccgtatcgaacgatcccctccccttgaaaagggggagggggcacactgcttccgtacggtattgcagaagatacctcagctatctgcggggatagtgagggaaaggcctacttcacttccgccagcgcggtcttatcgacgtagggcttcatcagcgcatcggcctccttctgcgccgcctgcaccgcggcttccggggtgactttggcatcgttgaccaccgcggccagctggttttccatcgctttacgcacggcaacggtctcccaggtggagtaccacggatgggcatacttcagctgttcgagggcgatagccgcgcgcggatcctgctgcagatacgccttcatttccggcgtatcgtaggcggccttacgcggggagaagtagccggtaaagcggctccaggcgccgttgacctgcgggctcaccagatacgtcaggaactgatacgccgcttttttctgcgcgtcgttgatgcccttgaagcttaccaggctggcgccgccgatcggtaccgcgcgctgctctttggccggcagcatcgccacgcccagctcaaaatctttgctgttctcgcgcataaagcccagcgcgccggtactcagcatcgccatcccaactttgccggagaagaagctggcgccgatctgtttcgaattcagcacgccggaaggcatgactttgtctttatagaccaggttctgccagaagcgcagggcgccgatggtggttggcgtgttgtaatagacttcgcccggatagtcctcgttaaagtatttcccgccgttggcgcgcaccagcgccgagaagatccagccgccgtaatcatcgttggtcgacggcagcatgatcccccactggcctttgctttcgtcggtcagctttttggcgtccgccagcagctcggcccaggtttgcggcggctgtttgatcccggcccgatcgaacatcgttttgttgtagtagaggatcggcgtcgagttatggaacgggatcgcataggtggtgcccatcacctgggcgtttttatgcattgcgggccagaacgccttcaccagaaaatcccccgctttttgatcgccatactggaacagctcgtccatcggcaggatctcatccttcagcgccagatcggtggtgaagttagcggacataatcaccagcgcgggcggctgcccggccttctgcgccgattcggctttgatcttggtggtgtcgtagttgccggtaaagatcccgcgcacttcgacatcctgctgcgactcgttgaattgcttaatgacgcgggtcatctccatggtcagcttgccgtccaccggcgccggaaacatgaagtcgatcttctctttcgccagcgccgcgccgctcagggcaaggctgagcccaaccgcgagagcggtgagaggtttaaacatggtctgtctccatcagtaaattatgctgtttctcagcatgaaaaagatgcacatcggcaggtgaaaagccgaggatcagcgaatcgcctttctccggcaccgcgccgcgatggcgacggctaaagcgtagggtgccgatgggggtgctgacgtggagcaaataatcggctcccatcagttctcgttgcagcacggtggcgggcaggcgcagatggctctcctccacgcggtcgctgatatgttccgggcgaatgcctaaccacacccgggattcttcacggtagcgcggcggcagcggatagcgcagctcacccagtaatacctcaccatcagcgcagggcagtgagagcagattcatcgccggagatccgataaacccggcgacaaacaggttggccgggttggcgtacagatactccggtcgcccgacctgctgtacgtggccgccgttcatcaccacgatgcggtcggccatcgacatcgcttccgtctggtcatgggtgacgtagacggtgctggttctgagctgctggtggaggtccataatgctgtcgcgcacttcgctacgcaggcgggcgtcgaggttggagagcggctcatccatcaggaacaggcgcggattgcgcacaatcgcccgtgccatcgccacccgctgccgctggccgccggagagcttcgccggtttgcgatcgagcagggtatccagctgcagcatctgcgcgactttatccacccgcggctgccagctggtcttctcctctttgcgcaccttcatgccgaaggtgatgttgtcgcgcaccgacaggtgcggaaacagcgcatagttctggaagatcatcgcgaagttgcgctctctgggcgacatttcggtgatgttctcatcgtgcagccagatctccccctcgctgaccggctccagcccggcgagcaggcgcagcagggtgcttttaccgcagccggacgggcccaccagcaccacgaattccccttcgcgaatatccagcgacagggcgctgagggccggtttaccgtcaaactgtttactgatgttttgcagactaagcatggcgtttagcaatcttccgttgggcagctgatattttcgtcgtacatccacggtccggcgtaatgggtcagaggatgctgatagctcacccactgctcgtcgacctggcgatgcatcaggcacgacgccggagagaggtcgtaatacggacgggtatcttcatgaaaatagggcacctggtggacggttcccgggatggtggagatgatggcctggcgatactgggtcatggtcaggctgtggttatggccgcagaaaatgcgcgtcagcgacgggaaacgctcaaccagcgccagcagacgatggccgttttcgcaggcgatagggtccatctgcgcgttgcccagcggcagcggcggatgatgcataaacaccgtcgccggtttatcgccgccatcaaacagctgggcttccagccacttgatggtttcctcggtcagccagcctttcgacgtacccgcccggctggagtcgataaacagcaggcgagtggcaaaatcgtctaccgcatagtgcatgttttgcgcgtcgcggccgagctgcgggcacagcggatgcaggtactccagaaacagcgctttatcgtcgtggttgccgggaatgagatacagcggatagttcaggctgccgaggatctggcgggcgacctcatactcttccgggcggccgcagttgacgatatcgccgctcaccaccaccgcgtccggacgctcctgcagggcattcagctgggagacgacatcggcattggcggcgttgacgtcaataaagccgtacagcttctggccgcggctgcggaaatgggtatcggaaatttgcgctaacagcatgaagagctccttatttgatcccggagaagccgaagcttcgcaggaactgtttctggaagaggatgaacgccagcatcagcggcaggcagaccatcagcgtgccggcgccgatgatgccccactgaccgccggattctgcgcccatggcgaacgagaccagccccacggtcagcacctgtttgtccgggtcgttcagcatcatcagcggccacagatactcgttccagtggtaggtaatgctgacggtggcgaaggccagcaccgacggccaggacatcggcagcagcacgcggaacagcacctgccaccagcgacagccctccatcagcgccgcctcttccagctctttgggtatggccagaaacgcctgacgcatcaggaacacgccgaacgccgaggtgaagtagggcatcatcaccccggtgagggtgttgagcaggccgaaggttttcagggtcagcatgttcggcaccatcatcaccaccggcatgatcatcagctggacgaggaacatcaggaacagcgtcttcttgccgcgaaactcgtggcatgcgaagacgtagccggcggtggtgatggtcaacagctgcacgaagaaggtgccgaaggtgaagataagggtgttggcgtagaggctcagccagtcggcgctggcccaggcatcgcggaagttatccagcgtcagcggcatacggggcagcagcgaggccatatcctcgccgaaggtcgtggcgctgaacgaggtcgccagcatccataaaaacgggctcatccacagcagcgccaggcagcacattaataccgtgagcgtaaagggctgcgagcggcgcaggcgcagccagagtgggcgcgatacgctgtgcgatcgcagcgccagcggcgagatttcagcgctcatagtgcgctcctttctccagcagtttgaggttaatcagcgagaaggcaaacagcccggccagcgtcaggaaggtggcggcggaagctttacctaaatcatgggtgtcccaggcgaggttctggatgtagtagagcagcacggtagtggcgttatccggcccgccgcgggtcatcaccgccacgtggtcgatctgggtgatggagtagatcagcgccgtggttatcacgaagctcagggtcgggcgcagcagcggcagcgtgaccttaaagaacacctgcgtgcgggtggcgccttccacgatcgccgcttcgcgcgtggaggccggaatgctttgcagcccggcgaggaaaaacagcatgtagtaaccggcgaacttccacacgccaatcagcgccagcgccagcagcgcgctattgctgcgccccagccagttgttgttcatcgggccgaacagcttcgccagatagtgatcgagcaggccaaggccgggcataaagataaacagccacagcgcggcggcgctgaccatcgggataatcatcgggaagaagaaggcggtgcgcagccagcggttgacgcggtgattctcggtcagggcgaccgccagcagcagggcgagcgtcacgcccggtaccaccgtcagcaggatataaagcagattattcaccagcgactgccagaagacgctgtcggcgaacagacgactgaagttctccagcccgacatactggccgccgtcgctgaccatgcgggtatcgaacaggctgtcataaatcgatcgcccgagggggaaccaggtaaacagcaataaaaacagtagggaaggcgacagtatcagccaggggagccaggtttttctcatggtggcggacgtctcattcaggcgtttgtagaagcccggattgtgagaaggattgactgcaaacgtatggcggggagatgacggtttaatgaccagggaaacaagcgccgggcagacgggccgcccggcatcaccccggtcagtggcgttcaggccgcgcggctgcggcctgaagcatgacgaggaacgatcagaagtcggctttcagcaccacgcggtagcgggccttgccctcgcgaacgtgcttcagcgcctcgttgatctgcgacatcgggaacagctcggtggtcggcgcgactttgctgcgtccggcaaatttcatcagcttgcgcagctcggccgggttgccggtggccgagccggagatgctgcggtcgccgccaatcagggtgaaggcggggaccgggaacggcttcattaccgccccgacggtgtggaagttgccgccatacgccagcgcttcaaagtacggctgccagtcgaggtcgacggcgacggtgttgataatcaggtcgaactggccggccagcgcctttaaggcttcgggatcgcgactgttcaccacgcgatcggcgcccattgccagcacttcctgctctttcgccggattggagctaaaggcggtgacttccgcgcccatcgcgtgcagcagcttgatggcgatatggccgaggccgccaatgccgatgacgccgacgcggctgttggccgtgacgtgatgcatcagcagcggcttgaagacggtaatgccgccgcagagcatcggcccggcggattcaagatcgacgttttccggcagcgggatcacccattgccagtcggcgcgcagcttatcggcgaagccgccgcggttgatgatggtgggcaccgagccttccaggcagttcacgtggttgccgctgatacaggcgtcgcagtggccgcagctgcgcgccgtccagccaatgccgaccttctggccaaccttcagccctttatcctgcgccgcgctgcccagcgccgccacccggccaatcacctcgtgaccggccaccagcggatagctcgacatgccccattcgttgtcgatcatcgacaggtcggagtggcagatcccgcagtactccacctgcacttcgacatcttccggcttaaggtcgccggcatcgtactcccacagcgacagatcggcgcccgcttctttggcggcgtaacttttaatagtgctcatgacagtttccttgggtttggcgtagttaagaaggaagtgtagagcatggggcgaggggacgcttggcagaaggaggggggaagcttgcgtaagccggcttctccgcgagagagaagccatcacgacagttcagcttttaagtaacagcgcgttgagccagatttcgctccgctccgggcgcttatccaccgtctgccacatgttggcgagacggatatccgccagcggttcgatcagcgccgtcagctctgcttcgtcgagatcggtaaaccgccgcccctctttttctcgctcgcctgaaccgtatttaaatgagacgtaccagacgccgccgggtttgagggccgtagccagtttgtgcatcactcccggcagctccgcggcgggaacgtgcagcagcgaagcgcagcaccagatgccgtcataccgcgcgttttcgctgatactttgaaaggtcgcctgacgcacggccagcccgctgtgttgcgcagcccgctcgaccattgccggtgaggcgtcaaacgcctcgacccggtagcccatatcggcaaaggctttggcatcgcgtccggagccgcatcccgcatcgaggatcagcccgttcggttcaattgccccgataaaaggcgcgtacagagaggtcatatcgacagcgacggttgaagccacaaagctgtcagcgttctgctggtagtagttgattgtcatcagaatatatccgttccggcggcctgaggttcccattcatgaaggagcgtaatgcgcgcagtgttccagattttggcgaggaagtcatcgcggcgggcggtcgtgttgccggtctgacggattaaggtttcacgcaagggaaggtggctggtaataaaatattcgtttctgtcgcgcaggcggcgcagcaattttgccgacggtacccgcataaacttgcctttctccccgcggttgcagctcttgcaggcgagtaccaggttccagacgccgttgatattcgccacctcgccgcgcgccgcccacgggataaagtggtcaacgtcggccaggttcgcatccccgctttcgagactgatcggcgcatagcagtaaaagcagcggcctttttggtagccgttcaggctgtcgcgacagctggagatggcaactcgtcgggtattcagggtgctgaagagctgctgttcggcggcatcatattccacggcgaacaggctgctggcgatgttcattgcccacgcctgctccaccagacgccagcgggcgtccgtttcgtggatcaggttctggtactgctggcgctccgtcagagaataaaagtcgtcggtcagacggatgccttgatgcgttttacgctcgtcgataaaaaagcgcctggcgatttcgccctgattcacgttatgaaatttatccagcaccacgctaaagccgagcttaaccgttgccgcgatgagctgatcctgggttatctcctggcgattgaagcggctacaggcgctgagaaactggctttttggcgacgtgatctgtttgggggcgtgctcaagatggcgacacagatgctggctgaacggcaccgccagctcctcgaggcgtatcagatcgctaccgtcgcggcggatatcgtacagcgcatgcgccagcgcaaacttataggaggcgacgtttttgccaaaaagaataatgccgcgccagtagttctccagcgtcggttcgatctgatagaagcgcattgcggaaatcctgttttgggaaagtaccggcgttattacgcgtactaataacaggatctgataacaaattgccgaaaatgtaaaccgaattgagccgtttgcaggattttgcgagcaggctcggagaaagaggaaaccgcgagtgggaaaggtgagaacgaggggtttatatctggaacgtattgaatgttggccgaaatgcggcttgcgctgtttttttcaacacttagcgtggcgatcgcactctgccgcttgcgcagcagccagtgacaggtataatccagaacgttttccgtatcctttccgtgccggagtggcgaaatcggtagacgcagttgattcaaaatcaaccgtagaaatacgtgccggttcgagtccggccttcggcaccatacgatgcaattaagtcgcctaagggcggctttttttatttctgaaatcagctagatactctaaattctgttcgtttcttgttctcataatatctgatggtatctgttggcatatcgcatgatacaggataccgatccgtatatcggaagttcgattttaagtggtatacggttttgagcaatgtgagcggttgaaagaggtaaaagcctggaaggtggggacgtcagggatgtgccaagaggggcgctgttaagtccgcactgtattcattagaagggagaatgtcagtccaagccgccttccagtcacacagttgtgaaagctaagcccatatgtccgctgagtgccaagagcggacattgtcaacgttttatataattcaatggtaacgtatatgatcttgacccaccatctccggacagcttttgtatcttaggttaacgatgcacgttgccgccggtattctctcggagagtgatatcccagcgcactgtgcgggtggttttcattgtaatgcgtgaacgccgctgcaaggtttcgcagggctgttctcacatccggtttcggcatgaacgcgatatagtcttccttcatcgtcttcacgaaccgttcggccatgccattgctctgcgggctgctcaccgctgttgtacacggctccagattcagctctttggcgaacctccgcgtttcatgcgcggtatatgctgaaccgttgtccgtcagccactgcactggtgtttccggcagcctgtcgccgaagcgcttttccaccgacctcagcatcacatcctgcaccgtcgaactgtcgtagcctccggtgcttgcagcccagtctatggcctctctgtcgcaacagtccagcgcgaacgtaacccgcagtttttctccgttgtcacagccgaactcgaagccatctgaacaccagcgcatatcgctttctgccaccgctattttgcccttatgttcacgctttggccgctctggtttgtcatgcaataacaacagattatgctcgctcattatcctgtaaagccgtttggcgttcacgggtgtcagcccctctgtgcgacgttgcttacgcaggatgccccacacacggcgatagccgtaactgggcatatcgctgatgatatcgaggagccctgacagtatttcagcgtctgcttcatcattacgccgcttacagcgcctgtcctgccagtcggcagaacggttaattcgcagtgacagctgcgcacgcgacacgcccatggtgcggctgaccagggctattccccgtcctttggcaacaagggcgcgtgcgctatccattttcgcgactgaccgtactccacagcttctttcaggatctcaacttccatcgtcttcttgcccagcaggcgctgaagcaaacacgcctgcgtgaaccgcgccatcttgagcaactgatccgttcattggatcagattgactggttcagtgcgcagaaagatggtctgggcgatctgtatgaaggtttgctggagaaaaatgccggtgaaaccaaatccggtgccgggcaatatttcactccacgcgtactgattaacagcatggtgcgctgcattaaacctcagccgggtgaagtgattcaggatccggcggcgggtacagctggctttctgattgcggctgaccagtatatcaagtctaaaaccgatgacctttatgatttgcccgccaaaggtcagcagtttcaaaagaacaaagcatttgttggcgttgaactggtgccctctactcgtcgcttagcgttaatgaactgcctgttacatggcatggaaggtgatgctgaaggtgtagtccatcaggggaatgcattaggtatggccgggcaggcgctgccgaaagccgatattatactggctaacccaccgtttggcacagcgaaaggcggtgaagccagtattacccgtgatgacttgacctatccaaccagcaataagcaactggcttttttacagcatatatatcgcaacctcaagccaggtggccgcgctgcggttgtgctgccggataacgtgttgtttgaggctggggtgggtaccgatgtgcgtcgtgacctgatgaacaaatgtaatctgcataccatcctccgtttaccgaccggtattttttacgctcagggcgtcaaaaccaatgtgctgtttttcaccaaaggcactgaagccaataaataccaagaagaaaactgcactgaaaatgtctgggtctatgatctgcgtaccaatatgccaagctttggtaaacgtactccatttggcgatagtcatctcaagccgtttgaagcagtttttggcgactctcccgatggtaatgcacctcgtcagcaaggagaatggagttttaacgctgaagaaattgacgcgcctgacacggcggaaaacgacaatgttgatgatcgcctgataaccagccgctggcgggtctttacccgggagtggatccgcgataccaaaggtgattctctagatatctcctggctgcgggataacagcagtgtggatgctgccaacctgccagagccatctgtgttggccagtgaagcgatgagtgaactggtgcaggctttgggtgaactggatgcgttgatacgtgagctgggagctggggaagaggcggataagcagaaagttctgctgaatgaaatgctggacggagtgaagggatgaatgaaaataaattgcctcgggaatgggttaatacaaaattagggaatatagttgattatggtcggtctgctaaaaaaactttagttgatgtgactgaaaatacgtgggttttagagcttgaggacattgaaaaagactcatctaaactcctttctaaggttagagtaactgagcggccattcaaaagcacaaaaaattgttttaataagggagatgttctctacgggaaattgcgaccatacctgaataaagtcatcatggctgatgatgaggggggttgtaccacggaaatcatccctattaatgcagaacctttttgcattaataagtatatatttttctggctaaaaagtccgttctttttacggtacgtcaatgaggttagttatggcgtgaatatgcctagactaggaacaaatgatggccgaaatgctcctttttatttggctcctttagctgagcaaaaaattatatccaataagctcggtagtctttgggctcgagtagagagcattaaatcccggctggaaaatatccctgagcttttgaaaaaatttcgtcactcagtattactttctgcagtaagcggaaagcttactgcagaatggagaaatgaaaataaaacatcagaatcggcaaaggaactggttgttcgctggattagtcttagaaaggaacggttttctatatatcagaatgaattgttggcgcttggtgatttaaagagaactaaaaaatttatagaaccacaccttcctgatatagaaactggaggagaattggttgttcctccatcctgggaaatagttagtgtttctcaaattgcagactgtctggatagccagagaataccggttaaaaaagaaaaaaggattaaatctgagggcctctatccatattttggtgctaatggtgaagtggaccgagtagatgactttatatttaatggtgattacgtactagttacagaggatgaaacattctatggaagagtgaagccaatagcctaccgttatacagggaagtgttgggtaaataatcatgttcatattctatctgccccaacaaaatcagcaaatgattatttatgctatgcattgatgtattataaaataatcccttggttaactggcactactgggcgggcaaaattgacacaggcagcattaaatgtcttgcctattggacttcctcctgaaaaggagattgaagaaatagttctgcgtattgaccaatttctttcctatgctgattccattcaaagggcggctaataacgcattagcacgaatcaataatctcactcaatccatccttgctaaagcattctgtggtgaactcactgcccaatggcgagaagaaaatcttgacctaattagcggcatcaacagcgctgaagctttattacaaaaaatctctactgagaaattagcgtcaggtacctcaaaaaagatagttaaaaaggttgttcgataaaaatagcccacatctgtgggctgttaattaatataaattataaaatgttttattttatttagatatgatctagtagttgatttgttattaacttttcgcggatattttccaaaatgcttgatgcttatcataaagctcaagcaaggcttcagcaaaagaatcgtcgacggtataaaaataacattcaggtacgtttaagaccttggcaaaagcgcagactgtctcaaatgaagggcgatgtgtaccgttttcataatgagacatcctggagtaggcggtcgcctcctctattcctgccataacagcgagtttctcctgtgtcaattttgctcttttacgagcttctttcaatcgcttggggatcatggatccatcttgatagtgtgccttgacaccatctttagcattccttaagattgattttctttagacttactaaagtacttacctttaggctgaacatatgggtttttatctgatttttgagagattctttaggtatgtaatcggtgggttatcacggggaattttttgaggaggagtatatgtacaggaaaactttaagtattattttttgtataccattatcttcatatgcagatgatcccggaggttttgttaatagacagctagcaaaagaccccgcgttagattatggaataggggatgtccatggacctgtaaaagaaatcattgagaggactacgaggtcagaagaaaaaaggatgattcgatatgatccggacgaaaacatttattatataaaaacacccagtaaggcgattcatatctcatctggttatccaaatcctcttcctgtaagagtggatatcgataatgcgtacaagcattcctcaccatcaagcaacttgatgaagtttgattattctttatatgacagagataaatatgggaatataaaatccattagatcatatctttatgataaaaataataaagagacaatatatcaaacaaacttgatatatcgaaagctagcatcaggagatatcgaggtttcatatgataaaccttctcctatcttgggtgaaataaaaaggtattataggaaaggatttgtaataaaggaaacatttataaatgccaagggagtgaatatttcaaactatcgttctgaaaatgtccctatggaaactgttatatatgaatatgagtttggaaaagataaaaaaactccattgtttattttgaagaaaagatatgttgataataaaagggtgacatataaaagttgggagaagtattcagaaagtggtaatcttataaagaccttttcctcatccttgaacaaccctgaagtcggagatggtgtcgagtatattaattataaatttgacaaatactctaactgggttgaaagaaataaatgtgctgttgaagacaagtggggtaagtactcatcatgtactctagagaaaaggacaattaagtatcattattgattctttcttcggtaccagtggtatgttacatttaatagcgattatttaatgtaatattccactataaaacttcgattccttattttatttgtaacttttatcttgaagttgtcctgtttttagtgtttatttatcctggtaaggattaatcttcttaaactcattaagctttatgttgaggccgctatgaccagaaaaaaacctgaagtaatatttactttttctgtaaatgataaaaacttcaaggatgttatgagttcttatcgtgggttagaagtcattgttgaatattatgaccataggattgatactttcaacagagaagtttcgcattggtttaaacctacatttggtacgagtagtttttcaaccgcaataatcaattttgtgaagaaagaatatcctgagattgatgcagaaaatattgaagtaaatcctatacttgatgaactgccctttgataatggggactataacaccttaggtttgcttcaaatatcaggactaacgatctgtgattggaaaaaaatcgctacaaacgttcagatcgacaccctttcagcatggcatggaactgaagacgagattgttttacacttttcacgtgaggttcccggtgagattatgcaatacgtgaaaaatttacatgggtggacatcttatacggggatcaccgttagtgcattggatgagggcatcgtcgaaaaatatggacttttatcgtatatcgataattaataaccctcacattatctttaattattaattagttaagtttagtccatgagtccggccttcggcaccaaaagcatgtaaatggacctcaactgaggtctttttttatgtctgaaatccagtatttatctacctttcccgctatattaactctctcaaggtctactgacatcaacgtacatctaccaacacatgttggtacagatgatggtatttccggttcgataatgcttgtaccaacagggaggggataagcatggcgttaacagatatcaaggtcagaacagccaagccaacggataagcaatacaaactgaccgatggcagtggtatgcacctacttgtccatcctaatggttctaagtactggcgtttgcagtaccgatttggcggaaagcaaaagatgctggctctgggtgtttaccctgaaatcaaactggcggatgccagagcacgtcgtgacgaagcgcgtaagctactagcgaatggcgtcgatccgggagacaaaaagaaaaatgataaggttgaacagagtaaagcacgaacctttaaagaggtagcgatcgagtggcatggcaccaataaaaagtggtctgaagatcacgcccatcgtgtgctaaaaagtctggaagataatctctttgcagcgcttggtgaacgtaatatcactgagttaaaaacgcgcgatttattagcccccattaaagccgtggagatgtctggacgtcttgaggttgctgcccgtcttcaacagcgcacttcggccatcatgcggtatgcggtgcaaagtgggttaattgattataacccggcacaagagatggctggggcggttgcttccagtaatcgacaacatcgcccggcgctggaattaaagcgcatacctgagttactcgagaaaatagacggctataccggcaggccgctaacccgctgggcaacggaactcactctgcttatctttattcgatccagtgagctgcgttttgctcgctggtcagaaatcgattttgaaacttcaatgtggaccatcccgcctgagcgagagcctattcccggcgtgaaacattctcagcgaggatcaaagatgcgtacaccgcatctggtgccgctttcaaagcaggcgctggcgatcctgaagcagataaagcagttctgtggcgaacatgagctgatctttattggcgatcatgatccgcgtaagccaatgagtgaaaacaccgtaaacagtgcgctccgggtgatgggctatgacactaaagttgaggtttgcggccacggcttccgcacaatggcctgtagttctttaattgagtcagggctatggtcgaaggatgcggtagaacggcagatgagccatatggaacgcaattcggtgagggctgcgtatatccataaagcggaacatctggatgagcgcaagtttatgttgcaatggtgggcggattttctggatgtgaaccgggagaaagggattacgccgtttgactatgcgaagatcaaccggggtaatggtgagtgaaatgtttattagtgttgtacctttgagtctaaactaaacgcggctgactaaatcaagtgttgcgttggtaggcagtgataaatagcagagttatcgccggggcaattcattccattgagtctcatcggaaaaaacaattcagcacaaatcaatatatagccatctggaagtatgggtggttatatgtttcgtgtttcattttaaaaagttctgaattgctagcataagactgccttggcggtcatctttagatggtggcaactatacagagttactgacaggcacgactgtttcaccatcaataaaatagttagatgaatcattgtattgggtctgtagtatcttatttagcaacttacattctctaggctgcggtatcattctcccaaaggcaataaagaacaagaacataattgcagcaactgaatataatattagatgcccccagataggaatttggtcatgcctgtaagtggataatatcaaagataaaattgcaagaaaaatgaattgcaacgaaaacaaagcatacatactgttctcgaaccagaaagaaaatcctttcttgaatataagagaaccatttttaaccaataaaaacgatctaaattttttaaagaatcctgtgggtattaactctctattttctatcaataggcgtagaattattttctgagtagcgacatcagaaattccagttatacgatagctgactattctctgaatatcctcctttatgcaggtgctaactttatttgatagtttatggttatccagaagatgttgcaactcgtttaatctagagttcttgacttcattaataaattctattattccccgtattttccagatgataagagccaatggccctgcaatgaaaataaagagaagaagctgttttatctgcaatgatccgcttgatacagcagcagtgatccatccatttattatatctaatattttatccatagcctaaaacccaaaaatgatattgtctgttatgggggaagttatcgttacaccgtctaatgattcgagataacttcagcctgttttaaaatcagctctaccgtacccgatgttttatccggcggatacttatacttgcgcagtgtctggcgcaccaagatacgcaaccgtgcgcggatagcagatcattttcaggccgagcgaagcaaattctcaacccacaaaacatctcggtgaccggccacaattcttcgagcaaaggccgacaactccgcactctcagaaatataatccgcaagagcacgcacatgttctgaaaacgaattatcgatatccacatttccagattctgttagtggaaataacctatcggcggcatcaatctttcgtgttattgaaacagcgagcgtcttgcgtttgtcaacaaggtcagagtgatccaagtggtaaagcctgattgattcagctgctcgcctattgcgaccgacgtgtttctccttcgaatatgtcggtataggcattccagtttcgtcaaaatctataaggccgggctcgtctggcttgcacgggtccaaaaggattgggctctcatttgcctcatctgcacagcaagttgcccgcttcttctcatcatgaaggggaaaattttctcctttcccccctgtcttctcgctttctttatccgaccgcacactgttgcagaatgtacatgcaaatctataattggaagggctaaaagccgaccacggatatttgctctttggacggaagtgatctactgctccatcagaccgttcctgcacaatctcgcaataataacacttgtcatgcgatagcttcattaatggtcgctttaggtcgcgccatacatcggaatgatctttaatttttccaggctcatctgcgatagcggcgtctgcacgcacctgccagctatctggtaattccaactggtccagattaatataccgcacgtatcaatcccccttcttattcaaggcattctgaattagacggcgagctttctcagcctcgtcaggcagctctttcctttcacttattggcatcgcctcctgatccagccttcgtaatgcctctttaagttcgggatcgcgcacctcatagcggaacccataagtttggagctcttcgttgatttccttcagcgttttcctgtcatcttcacttagcacatcctgtccgctgagatggcgcttcctcgcaagcagatcttgggtatgggtgtctagggccgcacttagtccaaacatttcactggtcatcacacccgcatagcccattccacgcgggtgcgtgtccggctccgcagccgagatcgcctgcgtatccttatcgcgcgtaagaatctgaacttgctccttctcaagctcagctacggcaactggattgtgcgttgccagaagaacgtgactactctgcttttctgtcccattcacattcagaaaattgcggatatgttgaagatactcgacgctccatcttgggttaaggtgcgtatcgggctcgtcgagcagaaacaggctttcctcttccgctgtgaagcgaagcaagcctagtacagttagaagttgttgttcgccttcgctcaattcacggaacgtaacagatccatcgtttttccgtagcttgatcctgattcgtacctcgtcgattaactcagaaacatacgtactttccaaatcttgaaagaactgggcggtgctcttacctccagccagcttgcgcagtgcaccaaggtctttcacaaaaagatacaagaactccagttttcgccagttccacaggctgaccttttccttgcgggtgatccgcaatggcgcaagagatatgtcgtaaagtgtcgctaagaaatcggatacgacgccacgtgcattccagaagcgtggatcgccgtcattggatgtccatgatggctgtctaagaacaaagagaacggattctattcccccctcttcaaggccgagctgttcctgcaaaaacttgtctgtcaactcggcgttattcacaatgaaagacagcaaaacaaaattgctatgaactggaagcgcatagaacagacgcttcaagccaggattttttccagcccgcaggtctctatcgtatcgttcgagatatttgagaaataccttttccatcctttcactttggcctgaataatagccaaatacaaacctcggcagatagccgtcatctggatctcgcaacttggaaagagccattgcttcgccaggggtttcctcaaaggtgatgacagcagaaggaggttcagcatcgggatcatatggtgcgagcttaatgcgatatggttctttgcctgctggatcggcatcaatgcgaacccatttatccttgatctgatagcaaattcgataagcaaaggacggtttgtttttgttccccttcccatcctcacccatgatcaggtcccggaaaagaactgtagctgcctccagaacattcgacttgccagtcccgtttctgccaatcaatacagtaatcaggtgcccctgagcgaagtcaatagtcaggtttttcaggttcttatattcaccaatccatagccaatcgatacgcatgatcactcctcactgatcggcatcagccttagccagtcttcatttcccctgcgctcgacctcaaggtcaccattttgcaggtgtatccgcagctcgttgtagaactcctcaaccgcatccgatgtcgcgccatcgccaatgcccaacgcttgtgctgcgtgactagctgaaacccaaccttttttggatttcataacctcaatcaaattcgccatcttcgccccttccttaattggcttgttgggatgcgctgccgccttgcgtcctgagcttgttttttcttttattggcgcgctttctgtttttatcctctcgatcaggattgaggcgggctcatcattcagattttgtggaacaagctttcccttgaatgctgtttgaagaatagacgcgtcaagtctaggaagctgatttgatgcggcagtgtattcgttagatacccggtctagccaagcaaaagcgatttcaatccgacggacaatttctgcctgttgctcttttggtggtaacggcaacggcgtgctgttgagctcttttttattgatttttggtagtacagttcgtccttcacgcaaggcagagaactgcgcgaaatcctcgctaacaagccaataaagcaaaaattttgcttctaattgcgaaccaacatttattgggtacatgtctgcgctgcaagcgccgtcaaagtcgacaagaaccgcttttcggagataaggtcgaatttttgaatataaaatctgccccggataaaatcgttgtttggcgcttgtgacgccgtcctctccaatcgtctgatatgacagaagcttcgccgtgccgctttggatattgttaggtgcaatatgcggcaaagcaagaatgctatccgggcgaaccaaattggcggcaacagcagctacctcctcaaatcttacccagcgccagtctgctggtaagttccagcatcggctttcgggtagggttgtttcgctctccatctttccgatcaatccgccgttaaaagagagagccaaaacacgcgccctgaatttttcaatcagtgctgggattttatcgagtgcatcgcgagcggaggccgttcgagaatttaactcatcaagcttggcaactatcctcttttgctccgcgagggggggaacagagacctttgcgtctaaaatgtgcgtttccgataccgcaggataaagcgttccactttgagattttgaaatagatgcgataaagccttcagaacgaacccaattgaacagatattttggtgttatcgcgttattggcacgaagtggtacaattccagtggtcgttaattcgccatctaaatcctccgttactagagcgatgtttttcagatatgttcttaccgttgcgaatagaacatcgtcagtgttgatcactctacgtgcacgggagggagcctcccgcccgaggaatttctttggctctgttatcttctgtatccgattatcaatggagccgatatcgacatatcgaaattgcctctcaggttgccgcctgggatcaatactctcatatggctcgacaaccattttcagtgtcgtagacgcccacccctttggtaaatcactcatgcccgccacccatgttacggcacagacatgttgccagtcgaagctgcgctgttttgaaccctttaatctccagtacgtctgctccaactaccaaaaccgactggattatttgcgtaaatttttccctcattgtcattcgttaacctcagaaggttcaatgagctctccgacgacggcttcaatttcattcattgccgattgaagatgagagaggatcagagcggcaatctcctctggagtttccgcagcatcctcggcatcaccgctttcatcgcgcagccaagaaatagccaaactatcatctcgctcagcaatttcccgtcgcgaaaagcaacggaaccggccagtttctccttgatctacgcgctttgacttaccttgcggatcatttccgaagcatttctcaaattcagagaagtgcgcatcgagcaacggcgtagttttcccgaatacgggcatgcttgaacgcaagtcataaagccaaacagactccgtattattatccttcttattgccaaggctaaaaaacagaacatttgtcttgacgcccgcgcttgcgaaaattcccgttgggagccgcagaactgtgtgtagatcgcacttatccattagatcgcgccgcactattctgccaacgccatcatctgatagcacattgtccggcaaaacgaccgccgcgcgcccacccggttttaagccaagatatatgtgctgaaggaaggccaattgtttgttggcgttgttgtgtgggagatcggtgcgaagcgatcgtctgctcccggccttgctcccaaatggcgggttcgcaagaataagatcggcgggcttgagcccatttgcgtcatccgtcagcgcatcgccgtatatgacctcggcatcgaggccattaagaaacgtattcatcaaacaaattcgacgggtatttttttcaatttcaacgccttgatatttcgggggcgttttctcatatgcctgtttcgtattctccgaacgaacaaaccggtccgctgcaattaaaaatccgccacttccaaccgctgggtcctgaattatctctcccaattttggtttcatggctcgcaccatggaattaaccagtgctcttggagtaaaatattgacctgctccagaacgtacatcctgcgagctcttttcgatcagcccctcgtagatgtgtccaaatctatcacccgacagatcattccaatcaattttggcgatgccatttactacggcgtgaaggttctcgtcgtgcgaaaacactgtagtgggaaaggcgtatattgcctgtatcgtttcactttctgcgctagtaccaaggtgggtcagcatctcctgatagaagcccagcaagccatctttaggatgacttaggaggtctttccagcggttgccagatggcagaagacgctcaacaccattctcttctgcaattttgaggaaaaggagatacgttaattcagacacgtattggtgatagctgatcccatcaccacgaaggatgtggcaaaggttccaaattttctgaactatattctcatttttcatatgttgcttttttcactctaaacgcttgaatgaatgcaaacgtaagcttgtccgccaagaacggctttctctacggcattcatccttggccctctggagcaactggcctgccgctggcattctcggtctgaccagcatgctttgatttctttgccgctatgtattccctcatgaactcccgaatgacctgcgcggcgggacgatcttgctcgcggcatatcttgagaaattcatcgcgaagctcccgctcgacacggattcgcattccggcatttttttctttcatggctccaagtgtagcctttggatacacatcaagccaagtcgaaattccgcttggagtcgaaattatccggaatttcgctagcgggcgttttgcggcatatgaacgtctgagccgacgcagtcggtccggcagcttcgttggcggcttctcgctgtttaagaaagggcttaccgtcgtcattaaggatgtttttaacgatcagattggccttcagggaatatttggaatgaactgtgtcaaagttgtttttgttcagattaacttttccacgctcttacagtggcacagactcctgaccgttactaatgtttgttaccaacggtacgaaagtgggtcttctgcaaattgcggtggaagaaaatcaatgaaactttttatttaacaacgacctagactgttttaagttatggataacgatatgcctttacttgagacgcttttgcaattgccttgcgggtggcaaacgacccggcaaaccattcagccttgatgactaaatggtttgccagcgataattacgatgcttcacgttctgcaagttcggagttactggcataagggacttttccagaaggtacaacctttgcagctgcgatcaaatgcacatcctgatcgtcaaagaaaatgtgtggcttaaacgcctttagaacttttgttttctctacaccgcccagaaaaaaagcctcatcgacataaactccccagcttctgagcgttttaatgacgcgcatttccgaagggctgtttctggccgtcaccagtgcaattcggacgggagaatattcaacgcgggttggcaatcgttcctgaagcttggctattttttttaaaagagtggcatatggcccctcttccatagggatatcttgttgcgcatcttcctgggcgtgaaaagcggccattccttgagtcttataaaccagctcgctttgatctgaaaaaaggactgcatcaccgtcaaaagcaatgcgcacttgcccttccgggatatcagatgcatcagaagggggatctttcaggattgcagcggcgcagaatcgggaatcaatcaccttttgcgcatcttcaacgttagttgttaaaaacagatccacatcaaaggcatcaaggtaatcggcaacggtttcgcctgcggtaaaagctgaacgtgtaatatcgagtttgtcatggcgaatggtattcaaaacgcggatacctgtatcaggactgttacgcgacatcacaacaacctcaaccaacggcgatttatcatccggctggcggtactggttcagacccagcaacgctttaactaaggggtagcctgttccgggctgtaaaggctggttttcgtgttccagcatataggcgcgatatttttcaatggcgctatcaggatcggtcgcataggtttcgcgaaacatacgatcggattcgctcatgtcgaaaagcgcagttgcgctgatgccgataactaaagtgttacttaaatctaaaggcattgttactttcctgaagtgaaatcttaaggttgtagaagcaaaacatcataacgcaaagaaagtatttcagccattagaagagttccacatcaataaattatttccactgggattatttttactaatcaacaatatcaagaatagatttacatttttcttttatatctaacttcatactttggaattcttttttaccacttgctaattcaccttccaatttattaatattgctttcatgcttggaaataatattttgaaggcacaatatattatctaacaataacgtttctttatttgcaatatcaagaagatatacttcatccgctgccacataagatattttaacgatgctatagctttctttttttatacctatcgcgattcttcgctcatctggaaatatcgttagaatagcaagatggatttcttttaatgataaatattttctgtactcctgacgcctacgctcgtagtaagaatcatttccatagtacaaatagctaataaaaatatcaccactataactttctgatatatgtggttggtaaggatttcctgcatgaagcttaaatgagtacacactaatctcatagccatcctcgactttttcgattaaagaatattcatcaaaacatgtttctgttttatctgatatatatgtacccattttcccctctatgtatttaataaattcttgtagtgaatgagtttaaactatcactcattaaatgtgaaaaaaccgccagtcaaggcattgaagagtttttcggtttcagccgttttatcatattgttttttaacaatagatgcatggaaatcaaccaatctggcaaaagcaagttgtttatccaatggaggtacaggtatcctgagtacagataaggtaccttggctaatattttgaatattcgccccttgccccccacttaacatttgctgtttcattgaaggtgtacggaagagaaagttaagatattctggggtgattgcaggcttttctatcctgtatcgaatacaaaatccactaaatgtgactttctctttccccggataaatagtaagacatctcccgactaaggctttattgccattagaccgaacaaagacaatatcaccatctttcaaaagatactcagcggaaggaggcgtgtttaattcaatttcaccgatattgtccatactggtaatcgttgctagtgatttgaaatcaccgactcctagacatttaagcatcgttccagattcacccttcgagaaattcatcccatttttaaatgaaccatattctaataaagaggtaacaccccatttcttcgggtttttaacgggatcgccaaatatatccaaaaaggtagtacgtaaaaaattatccgccagcttaatggcttgctcgcacttttggcgtataccatcggctttgtcgaggatagcagcaatacgtttttgttcttcaatcgatggaaggggaatacgaacctcagcaagtttctttttgttaagagtggcccccatcacagcattatctgtcatatctgaaaacgctaatgatttcatgacatggcttagatagatagtatctaatttatttttgttttttattggaagggccgcaattgcttcatttgtataaatatccgtctcagataaacaaactttcccaatagataatttaaaactaaataatactgtatttgctggaattttttttattccagactcctggatagcgagatcggtaatctgctcttttgtattcgagatccatttaccttgattcatatcagctatagataaccatctatgaccttccccccaatatctgctattactcctgctgggggtttttccgatatttatttcacaaacatcgcttaattttaccatcggccagctcacagcatcccctccagctcatccagatccgccagaatctctttttccagacctttcaaccgtttcagtatcaccttcggatcttcgtacacctcggcctgatacaccacctctttatagcgattgatagagaggtcatacttctgcgccgcaatatccgctttcggcaccacaaacgccgcctgagtgcgatctttaaaatcaacgccagcatcaatcccttccggttgctgctgtttcagcaacgaggctaatttctcgcccataaagttatcaaccggtagcccgcgcaaagtacggtaatgcttccagcttgccagcaaatgcggcaagtcgttgtcttttatcgggttgcgcttgtcatccaggctgtagccatcattttgtagatcgtaaaaccagacctcatccgtctgaccgcctttggtaaagatcaggatcgccgttgccacgccagcgtaaggcttaaatacaccggaaggcagattgatcaccgcttccagttggttatcttccaccagagttttacgtagagactgatgcgccttgctggagccaaacagtacgccctgcggcacgatagtggcactgcgtccgcctactttcagcatttgcagaatgcgcgccaggaacagcagctcagttttcttggttttcaccatcgccgacagcgtggcgtcgatatcttcctcatccagtgaaccggtaaacggtgggttcgccaatatcaggttgaaagcatttttgctagcctgcgggaagttggtgctgaaactctggctcatggtgtcctgatagtggatatccggctcttccacgccgtgcataatcaggttcatagcggcgatacgcagcatagtagtgtcaaagtcgtagccgtggaacatgttgttatccacatggtcacgccacggcgtcagcagatcaccggtaaagattttttgctcttccagctcaccgcgttcgttgctgccaatctcggtatggatggactccagcgagctgtatttctccagcaggtactcatagctggtcgccagaaaaccacctgtaccacaggctggatcgcaaatcgtctcaccacgcgccgggttcggctccatcatttcaaccattgtgcggataatgtggcgcggcgtgcggaactgaccgttgatcccggcggtggtcagcttgcttaataggtattcgtagagatcgcctttggtgtcgccacgatccagcggcaggtttttgatcacttccacggctttggtcagcagagaaggtttgacgatctccagacgagcatctttcataaagttgcccagcagtgtcaccttcgacgcatcggcctggccgagctggcggaaatgctggaatacgccgtcgcgcactacttccatcatttcatctgaaccgaggttactgtagtgactaaaacggaactcctgctgctcaggcgcaaagcgcggtttaaaatcaatacccgcgatttgtttacgtttctcgtcccgctgttcctgggtatccagcattcgggagtacatcaggtaggtgatttgttcgattacggtcagcgggttagtgataccgcccacccagaaatcttcccatagtccgtcgattttactttttaagtcaccggtgatcattgttaacgtctataccctgttataaatacaaaagccccgctgccggggcttgtcatgtgcgtattataccgttgctgcgtcggtcacaacacccagctcttcgactatcttttgcaaccgggcgatctgctctatgtcggggaacacgccggtaacgccttcgttgtggatatgtgtaaacggctgctcaaagagctgccgcatctcaatggtgccataatcacgaatatggtttttcagcagtgacaggaagcgtagttgctggctggtcaggctgttgtcagcagcgaactgcgcaaaacgtatttccaccgcgtcgctgtccatcccaatgatggtacgtaataatttatccaggctggcggttgcctgcgggtagaactcttttagcgcccggatatcgacgttcgggttctggatcagcactagctttgccagctcatccagctcgctttgcgtcactggctcgccgttgcggatttttttcagtaccgggttttgctggaatagcggctcaagcgccccttgaacctgctggcgatagagtttgaaatcaatcgagcggatgttggttttgcgggtctccgtctggatcaggttcgcatcttcggtaatatccacctgtatcgagccaaattttggcgtcgcatctttctccatcaggtgcattataccgcgcaaatgaatgcggatatcttccagttcttccagactggcctgcttccaccagcccaaatcacgaagctgattaatccgctgtccctgctgttgcacctgggtcagatgcggcggcagacgttccactttctcgatgatgaccggccagagcacatcaagctcttccgggttggtataacgggcagtttgcgccgccagaatatccatatcaaagcgcatggcatcgctttgcccgcgaacgtccagccactgcatcagcggggccaggacagatagcagatcctgctgtgttttcggggaaagctggcgcagcactttttcatcactgtactgcgctttttgctgccacttttcctgtacggcaatcgacttttcatccagcgcgttgatctgctcgcggagctggtgagcgactaaatccaccgcctgtttgtcgaacttacgctgtgcagcagcccccagcataacccacgcttcgaagcgtttttgcgccagcgattttgtcgctgtgacttcggcctcttcggtatgcaactcgtgatactcaaagttgccccagtgatcgaagatgcggaatttctgtttatccagcggtttgccgttttcatcattaccgtatagccccgaacagaggcgtgtaccacggccaatcatctgccagaacttcactttcgatttgaccggtttggcaaagaccagattcacaatttccggaacatcaataccggtatcaagcatgtcaacagagatagcgatggtcagctctttgttggtgctttcatccagccctttaaaatcgtcaatcagttgctcggcgcggggatcgtagttgtcgatgacctggcagaagcgtccggcaaactgcgggtacatgtcgtcgaacaattcattcaacagcagcgcgtgtttgtggttacgggcgaaaatgatggttttacctggcagctggccatcctgatctttcaggccattttccatcaggttacgcaggatatagcggttggtgtctttgttgtagatcgcttcatccagcgccttgccatcaaattctagcgtattgggatcgataccctgttcttccagctcacggatttgtgcgtcgcttaatttctcccgtttgatgccttcgcgcaggaattcagtggtgtgcgtaacaacctcatagggaaccaggttgttatcagcgatggcatcttccaggctgtaattggcggtagggatgcgtccttcacaaccaaacagaccgaaagtggttttactcaccatgtcgataggcgtggccgttaggccaatctggagggcatcaaaatacttaaacagatcgccgtagacgttgtagatagagcggtgggattcatcggcgataatcagatcgaaataaccaacatcaaaatggtccatgattttcatcatgccgggataggtggcgatgtagatcctggcattctgcctgtctgctttcttcgatttcccgaccacatacagtggctcattggtgaactgattgaaggcattcgccgcctgtttacgcagctctttacggtcgcaaagaaacaggacgcgttttacccagcgagcatcaatcatcagtttgcttagtgcaattgccacgcgggttttgcctgtacctgtagcctgaacaattaacgattgtcggtacttgttagtaaaccgttcgctgacgcgggcaatggtttcaagctgatacaaacgtccggcaacggccttaccttcgttgtcttttacatgcggcacactgttcagtggcagacgggtttcacgctgctgaataagatattgcaggctttccttgctgtagaaaccaaatactcggcgcgggggataaccatgagttttatggtcgtcccacagccagatatcgtagccgttggtgtagaaaatgactgggcgttgaccgtattctttttccagccagtctgcatatagccgagcctgaattcgtccttgctcggcattgacgctggttttttttgcttccaccaccgccagcggtttatgcgcttcatcccacaagacataatccgcataaccgtcgccagttgcagtaggctgttctttaacaggatgctcctgcgtaacctgatcggtatttttaagttcttcgcctacattccagtcagcagcaagcaggcgggagtcaatcaggcggcggcgggtttccgcttcatcaatagagaggatgtcggcaacatgctggttgcgagctctggcttcattcaggcgctgggtgaggtgttcggctttttcctgctcttgctggagtgcgcgttgtaacgccagttcgcgctcacggctttcatcctgagccctgattgcatcttccagacgtttttcatctgcacgacctgaagattgtgttaacggaggaagagaaaatttgggacagttatcaacattaccatgggcataacgaacatagagccaaattcccagtaaatacgcttccttgagcagccaataggtatctttagctttaatacgtccaccgtgcgcggcgcggttgccatggatacgcagtgcatccattttcatgatgatggcttctggcatcatgctggtgaagacatcggcgttcattaaatcatacagatttgctttgatgccttcagggagccgttcctggcggtataaccaacgtaccatcaattcggtgtagttgcgtagcttgaccagacagctttccggatcggagtgaacatatcgttccgccatacacgcgagttctgccagttccggccactggctgcgcaacatttcaaaattgagagactgctccatcaatcatcgccttatgtcgtggatacaacaggagttgtggaaaggatatcacactaaattggctgacaaagtgagcccagacttattcactaaacaacatgactgttgaatgctgccttatggtactgcactggcaacaatgataaagaaggcgcagatgaaagcatacgtttcagattgttaacatttacttgaacctcaaacacctgcgagcctttcaatatttttgtggaacaagcgaatgaacggttcggtactaattttcagaaatagtgtccatcgctttacgaggcctccctgacattgggcgttgtgggacttcattgcatccgtatgaacagagcccctctttttgctcctcttttgtcagatagctcaatactcgacgaatatttagaatactggtgggctcattgtaacgcacgggaatattgatatcggctttataaggctctttaaattggcagatattaaaatagcccccctgttgggttaattccttccagagttctcctgcctgcagcgcaaaaggataggatctttgcgttttatgtccatccagccagtatgctgtatgtgcatggaagccatggtctacagtccactcaatgacccagaaatagcccacaactgcagcttttttcatcattttattcatcaataatcgcaggtcacgctcaagtgcatgatgatcttgatgtaagtagtggcgggtattttttttataaaagaagtctaggcgtaatgttagtaaacaagaatatctggctaccattgcatcgatatgattattcagaattattgaaagaaaccagtttggattccatgatgggttatattggtgactgttattcataggttagacctgtttttaaaacgttgtttgatgatgagggagtgcagataaaatatcttcagtgtacgtggtaagggtaagtacgatacgtaatgatatttagtgaatagattggataggtactaaatgtaagcctgggaagagtattaattatactaaaaaacccaaattaaattatttgatacatttctagctacagctaattttctctatttaacctctgacattggaaaacaaatgttaattgatttttgcatgtttcattcgtcactaagatcaaggtcttttctgaaacttaataattatagtcctcttgagtttttaatccgttctgtcatccaggcctctacttcactttttagccaacgagaacttcggccaagtttaattggtgctgggaacgaattttcagaaattaatctatagaaccatttgtcggtcatattggtgtaggcagtgataaatgccatgtcgacaagctgatcattcaatactgaatttgaatccaaggttttagttaatggcaaagtcgtttggctggtcatagtgatgctcccgtatggtggtgttgagttgggagagagcctgttgtcgatgggagagtaacgggcatctatctcatactatgagctcggaagtagaaaattacatctgcctgaatcatacagcccattgatgtctctttagcatgatgcgcccattgatatacctgaaaattctttcgaaaaatgcgtatagtgtttgtcgataactacgagagtaaaaaatcatatcggcatagtaattttttagattttagccctctattgtgggcttgccctcagaattaacattacattaaactcactggttgacttcagtaaaaatacaatttaaatacttagtatggtgtttttaaatacaggtatttatcatgaataagaatgataaggatagtcatttagatgcttttgggaaattattctctaatgaattatcacagaaagaaatggtttcgactgaggggccatcaacttctgccagtcctgaaaataacaaggaaggctctttattgcaggcatcagaggtgaagcaacttcctggcggtgatagtaagcatgagtgcgcagatgtagatctttctcttgctactctggtggctgaaggaaatcaaaatgaccctgcgatagaacgtgtaatgcggcagatattggctcaggaaaatactattcctaaaaagcaagtcttaaatggaggtcaagatccctaccttagtgatgttgattttaggtggttaaaaggagatgccaatgagcgagctattttctggttttggatatatatccgcactgcatcaaatagccgtctcaatttgccagaattaaagttgcaaaatggctgggattcagaggatcattgtttatattctttttttagacttccggataatcccgtcagctccgctgaaaggagtcggttaattattaccttcttcaataaactctcgggtttcttcaatcctatccaaattaaagagtcattcgaacatattcgtagtatctggcttcacttgattagccctgttcgacaatttaaatggttaaagaaaaaagactctgagggtattgaatgggtgtgggattatttattaaaaaggaaggatgtcaatgataacatccttttttggtttaagcccgcagatgcaaatgagaaatatattgcgatcatgggggcaattgattgctgggttatacgggggaataaaattgattgtcaggataaaaaattacttctggataacatgaaaaaagcgtatcagcagcgcgggcgacgagataaaaagaaaagcttcaatcttaatactgaaatttctataaaaacccgtagagagctcaaagagctggttaaattgcatagtgttaatataaataaatttattgaaaggctgattgatgatgaatatgggaaatataaagacaatcctaatgaatataaaatatctttattaaagaaaaaacaataactccactaaatttcatgcttatattacttatgtgaatagccggttgagttccttccggctttgcttttcacaggagtaaacatgtcccaaacccccgaatcgcaggataccagtgatatcatgcgtacctgccttaatttcttaccccaacaaacgactgaacgtattatttcccgtctgcaacaggcaattcactacgagcccgtaattggcattatgggcaaaagcggggcgggtaagagctcgctttgcaacgccctgtttcaacaaccggtatgtctgaccagcgatttgctgggctgtacccgtgaaccccagcggatagtgctcaccgtgggcgagcgcagcatgacactggtggatttgcctggagtgggcgagacaccggaatacgatgcggaatattcggcgctgtatcagaagttgctgacggagctggatttgattatttgggtcctgcgtgctgatgatcgtgcgcgggcgatcgatatcgtcacgcaccggtcactgcttgcttatggcgcggatgcttcccgtttcctgtttgtcatcagccaggcagaccgcattcctccgttgccagaacttgccggacaggttgttccttcaacggagcagtgcctttcacttgcggttatcagttcgcagattgctggtcagttgccgtcctctttcccggtgatggctgtttcagcacataccggctacaacctgcatgctctggtggaactgatgatacatgcgttacctgtacaggccagtagcgctttttatcgccagttaaagccagaaaatcatacggaggagggtgatgctgctgtacgtcagcgttttggtgaaatagccggttcggcttttgacacggtgatcgcttctgagcatctgccttctggctggagcttgttgctgaggaggttgcgggaaaaactggtacagctcgcatcggaattatgggagaggatttttggctgaaccggacagactcagccacggacagatgtaaatccgttactttttataccttacggataagcttcgtttaacgtaattcttaccaatttcatagtccgggttccatgtcgccagattatgaacaccgattgcggcggcgcttaccgctcccagaagtgctgttggtgaccacagggagcttgcgaccgcagtgcttctgtattcggtgtatacacggcaggttaatttcttctgctgattttaatcgcgtactcctctctttcctggaatctgtgaatgtccctgggcatgcgccttagggtcaaacgttgcactttttcagggcagtgtatgtcagaaaagaatatatcgatctgtataaacgatcaataataagaaattgatcgttattatctatcaataatagctttcgatatccatgaattgatcgtcttaacctatcaaaaagtaaggatatcctggctcgtttcgcaccgtttcctgctcctttgacagatgttgactgattaataacttatgcagtggttctctcctgaccgctgctgctaatccacaggtgatttatgaaaaccagaacaataattgctctttttctctccgccgcctctgtctctgcgcaagcaggcaactggatggtgaaaaacggatggtgccagaccatgacggaagacggtcaggcgctggttatgctgaaaaaagacactattggtatcttcggccagttgcagggttgccccaacggtcagcaggaactgatgggaagccgtatcagcattaacgggaatctgatccccacctctcagatgtgtaatcaacagaccggctataaagctgttgaaatcgaaggtgggcaggctcccgccgcagccaggaaagccattgaatcaattgccggtcaggatatttccagcgtgcaggtctttggcacacaaatgaaatttagtcgtggcgatatgctccaggtttgcccgaaatatgtcagcgcccttgcaggggtatcagcagaagtcaccgggaacaagccgctgaaagtaaacaaaggttcggtaatgaaagcggccagacaggcgtacacgaaagaatatgaccgtgaaacggcagacgccgctgattttggcagctatgaagtgaagggaaatacggtggtatatgaagtctacaatgccgcttaccgcacctacgataaaatcgttgttactgtaggatctgatggtaacgccaccggggcaaaggtggagttcatggggcaataaccccctggtattgtttctgactcaggtattaaggccgtgcctccatcgggaagcatggcctttttgcttttatgccgacttactcattgcatcacccaccacaacactatccgtaaacgcaggcagagatgaatgtctcaccgcgttttaacgacctgatttaacgactcatcatcacgccagccctgaccggctggcttttttattttcggagtgattaatcatgaatactgcaattactgacgccaccttatcgtcagacactattttcgccacgcctgtcgcagatgaacagcgccccggcttctggccgcggcactttggcacgattccacagtggatattactggaaccgcgcatcttcgcctggatggaccgtttctgtgcggattacagcgggggtatctggaatttttacactctcagcaacggcggggcttttatggtgccggatactgacagcgatgcgcaatggcaattctttaacagcatgaacggaaataacgcgcaaatgagtgcagaggccgccggaattaccgtctgtcttatcgagtacagccatcatgcctgccgtaccgggtgcgatgccatgacagcgcacttttatcgtcttcgtgagtatgctctgcaccatcaggaatgctccgccatcatgcgcattatcgactgaggatacaggtatgactttcaacttattactaccgcaggaactaccgctgacaacccggcgaactgttcagcgtgctctgtcgctgcttgaacactatctgcgcgagcctggcgcttcattcacgtccacaacggttgtccgggactggctacgtctgaaaatgaccgggctggagcgcgaaatgtttctggtactgtaccttaaccagcaaaaccagctaattactcacgaaaccctgtttaccgggactattaatagtacggaagtgcatcctcgcgaagtggtgaaatcagccctgcgccataatgcagccgccgtgctttttgcccacaaccatccctctggtgaagctgagcccagccaggccgataggcggattaccgccagactggtaaaggcgctgtctctggtagaaattcgggtgctggatcactgcatagtcggaggcatgacagtggtttcatttgccgaacgtggctggttatgaaggagggcaaaagatgccactgactgatggcatacagtggggattaaagcgaagtttcacaccgaattttggcgcaaggctggtacaggaaggcaaccgactgcacaacctggctgaccgggccaatatcaccggtaaatttgttgatgtcgaatgtcagaagctggaagaagcattcccgcattttatccgccagatggaactgatgctgagcactggcgaacttaatccccgtcatgcgcacagcgtcactctctaccacaacgctttcacctgtgaagccgatactctcggtagttgtggttatgtctacatcgttatttatcccactcaacgttaaacctttttcacacgcgagaaaaatgaaaaccttacctgcaacaactcagcgggcggctaagccgtgcccgtctcccgtgacggtctggcagatgctacttacccgtctgctggagcaacattatggccttaccctgaatgacacgccgttcagcgatgaaaccgttattcaggaacatatcaacgccggtattacgctggctgatgctgttaactttctggtggaaaagtacgaactgattcgtatcgatcgcagagggtttaactgtcaggagcagtccccttatctgggcgcagcggatattttgcgggcgcggcaggcaactggcctgttgcggcaaagccatcatccttcgatacgctgaaacttgcgagccgtcttccctaattacatcaccaatcttttttccttattaactcattgcataatgcgcctgccattcccggtgggcgtgtttgctttttacggacaaaataccatgcaaacagaagctgaaattttaactgatcataatgagctaatttgctcgaccagtattgaacgcatcgtcacaggacgtaatgctgcgctgggtcagatagaaatgctgatccaaaaacttgatgagatctcccggctaacttccagcattggtggcaacgtggcaaatcactgggccatgcgtcaggggcattcatacgactgctggctggtgcagcctgtggacaaggcgatgccggtaattacccgtaatatcgatcgcagtatctggcgcgatctgatgctgaaatccgggatgttgaccttgatggatgccgaagcccgcagccagtgggcaaagaacctggaggagggagaactcccggcgatcagcgaagccaacatcctgagtacctttgaacaactccaccacaataagcaggacgttttcgaacgtgggattatcaatgtatttaaagggttaagctgggactacaaaaccaataatccctgttatttcggcaagaagattatcgtcaacaatctggtgaagcatgacagatggggctacagcctgaactggggctggcggcgcgatcaactggccgatctggagcgaatgctctatctgctagatgggagaagcattcctgataaccgacatgatgtctctgtccgctttatggattttgtgcgcgacaatccgcatcagcaggttttcgaggacgatttgtttactatccgctactttcagaagggcagtgggcatatcacgtttaagcgtctggatctggtggagaagatgaatgacattgtggcgaagcactatccagggatgttgcctgccaaatgagagataatgtgtattagtcgcgacttgatctgacggttttcgctggcagcacacaatcaaatctgacagtctactttgaacgaggagcggaaattaacaattgtccccaaagtctatagaggtattgctaactttaccgcatattaatcaatggggatcaggtcaattacacgcctgatggatcgtcgcaacaaggagaatttatggataatctaactaggaatcaacactttatatctcaggtagagcagcgcagtaattgcattgacgagagcagaccaaaagataagcagcgaatctacaaatttgaaattgcagatagagaaaatagcgttgttcgattgacaaatattgaaggcgttaagataaaggctaacctctcttttgatgatctatttagtttcgatgtgaaaagctcaagggtaagaaaaaatttagaggatttctttcaaaaatttgaaacggacttagccccagcaactggtctccttatctccgagtcaaacgttaactcaggaagcgatgttttgaaggacgcagctgaacgagtattcaaagcaaagttcatggggtggattagaaacccctatttaattgctcgaacaatagatatgtttaagggattagaggggatgcatccaactgatcctcttttactgagacacttctccgacatacgctcgggagcaaaacctcacttggccgaggtttgcgcaatgtttagagtgacgagtgagcagtatttccagtggctggagattctttttctggcgttaatgacttcacccggagccacaaaaagtatcttagagtcgacagttgagatgattgttgagtcacagggattaatgggccatgtgatagtagcaacctttgacgacactccgggctgcagagtcgctgtacctgatacaggttaccttcaaggcactaatgatcccaactgtaatatgtttctttttaatttgaatcgaagcgcgtttgctgcatttagtgtggtggacttgtcaaagcagacccttgtagagattcagccgcagatgaggaggcaagtagggttgtacaatataaaattctcagcacagcaccatcacaatgatatgaaactacttgaattttttaacgtactagccgcgtatcaagctcattctcatattttttgtgccgaccctaagatcttcggaattactactatttaatgagtacaattactttaagttgagtagtagcaacttccgcttttggcacggagctgtctgtcagattaggtttagatctgtgttgtagctgtatcaggccacatctgagctaatacaacacagttatgtttgtccgggttcgatacctaagaacaatgaattttcgtgttggtatctgtgttggtataaaatgaaaatgttttttattaactattttaaatcatgaggttgagtcctatgtgcgagtccggccttcgcacaaaattccccaatcagtccactaaaatacttttttgtatctgcatttcatcatttgaaaacctcctgttgaggcgtctgttcttctggctccgacatggctagcacagcacgctccccactttccacccgcgcttcctcctcacaccacctttcaaacagcctggcgaatctggcgctttgccaggtttctccaacctggcttaagataaagccagtgaccacaatagcggaaataaagtaaaacagtgaaaatgcgatagctgaatttacgcccccgctggccagtaacgattgtattgttgtccaccaggcgcaggcaaaaatgacaattgaaattagccagaaacctccgctaacgatgtgaaaatttttaatttttttagcatctacagaaaaatgattttcatcacaacgatataaggatgggtttttaaggaaactcattaatcgtacatcatatgagccgatatttttatcagcgataaaagcgatcagctgatgggcgtgccagacaggaagagtaatcccgatctgctcatacaaaaatttcatttgtaccgtctgatgcgtcctcgagagtttggtgtcgggtatgtcagcgttcgctatctcagcgattttattcagcacctctattttggtttcaataggtaccttttcaaagcgaatttttcgctttgctggcgggctggacatcacttttcccgcccagtcgatgatctttttagccacatataaaagcgcgggtagcaaaaccagctttgcaatatctatctcgttaatggctcccatcgttattcctttataaaatgaatacgcaatgaatttacagcaccgactttattttatgtagccctcattattatgagggcttcgatatggctaattcctgggctggctcctggtctgacttaatgccaaccgcccaatacggcccctgcccggaggccgttatacttaaagactgaagccaatttccaccgatgccgcactgcgttccccctcaccgtggtaaaccgcttcgatgttgttaccatcgggatcgagtacaaaggccgcgtagtaccccgggtgataagttcgctcaccgggtgcgccgttatcactgccgccgtgtgccagcgccgcctggtaaaaagcatccaccgtctcacgatccctggcctggaaagccaggtgatgccgtcctgttggcttacctgcggaaccggggctattaatcgatgaaacaacaagctcatcagcccaaaaataatcgtcgtaggtattcacgacagggatctcaaggaccgccagcacggctgtataaaacgctttgctggcctcgaaatcatttaccacaagctggatatggtcgataagcctgccgcgatgtaatcggtaagtctccatgatggtttcctcattcagtcgtattaacaggtagttatccgttatctaaaaggagcgttgtacggatttgatggatgagtacaggtccggagtggcgatatagagcatgacattaaaatcctgtttgtcaccgcaatcctgacccctcaaccccgtcccccaatcactccgataaactctctgacctgcttctgcttcctggccgacagcttctccaccctgcgcatcgcggcttccagctccggttccggctcaaccgccgtcagaacgatacagccctccattacccgcacctccacccgggtgccggtcgaaaaccctgccgccgccagccactcgcccttcatgatcaacgccggaacaagacgacgatctggcaaacgtctcacataactcaccgtcaactgacgcttatttttcggcgacacttctggatcaaacgaatctacaatacaatcagcactagtcatggttgctattctcgtgaaatagtaattgtgatcagcggtgcgggtgtgcgctaacacattcgcaccgcgctaaataacacctgtaaacctaaccagtaataaaaataaagtccagactttaatcggacataataaacgtctttaaccataaattaagaattaacagaatacgtgacgctattaattagcgcctgtggaaaatgcctttcctgatattgctgaaataaccgcaaagcagattcaaaaaacaaaagcgagataatgcgcgcaacaggatgcccatgcccaattacgggcaccccatctctttagccagcgtacccttccgggacttcaggcggcgggcgatacctgccggcagggcggaccagaacgagagcgtcggatgagtccgccgctcaatctcctccaccgtcacttgataatcacaaaaactggcgcttttgggcgtcgcttgatccagcaaaaacgccgcgtattcgcctttatccggactggagccgataaaaataatcttccagtagccgctgggaagctccacctcgggcgcggcgggcagggtagcgatatgccgttcgaacagcggcccggtaacggaccacaccgccgccacgtcgcggcgctcggcgagggcgcgctccttatcctccagccgcgcccacgccccctgattcaggtcggaggcctgcggggtgatattggaaagatagtttaacgcctgccagtctgcgctggcgccgagcccggcgagcggcgcctgatgcccgcgatcgaccgccaatgctgcgctggcccctttatatgccgcgggggcaagggtatccgcagcgggtaaatccggatcgcgcttccagctgcgcgaacgcccgctggccaggctggctttggtgattttatacgccacccaattagcgaatttgcgctggctgttgttattgagcgtataggcttcgcgaaccagcgtctgcgcgcttccgccggtcgggcagcccacttcacaatgatccacgccggatgatgcggcagcgcacgcggcggtaaaaaatagcgacggcagaacgctgaatactcgggatagcttcatattattgatgacgtcaaagaaaagatgaatcgatgcataaaagaaccccctgaatagccagagcggaattcagctatgaatcgcaaagatgaagtgagagcgtaaaaagagttagccggtcgcagctgcgcggaatatcacaagatgatttaacatcacggcggatgttattttgtgaacccagaaatgatgttgaatgaggtgaccagactctcaagcccgctattttcagccgggctgaacgggtgggaatatgctcgacgaagcgtaaagcggtgcggcatccatggcgttgtctgaaaaatgtcgcggcaggggaaaacgcttctctctgagcggaggattattcagactacgcggatgaccgattaaggagagaaggtatgaaaaaggaactctggagaggcgtgctggcactggccgtacttagcctccccgcgctggcgaaaacaggcgtttcattcagccacaaagactgggaagtggtatgcgataacacgctgacctgccgggcggcgggatacagcgctgaagaaggaagcggaggttcggtgctgctgacccgccaggccggagcgggcaccgccgtctcgggagagctgatgctggcggaggtgaccgacagcgacgttctgccgggcaaactgacgctgtggatcaatggccagccggcaggcgatgtgaagccagcaaaagagagctggccgctgtcggagaaacaggcccgggcgatcgttaacgccatcaaaggcagcgggaaggtcgaatttacaggcggggaggcgccgtttgtgatttccggcgaaggcgcttacgcggtactgctgaaaatggacgatgttcaggggcgaatcggcacgccgggcgcgttgaccaaaaaaggcgacaggccggaaaatagcgtccgggcggcgattcctgccccggtcattcaccgggtcatgcctgagaaggcgcaggagagagcgttaaccgcgcctgagctggcggtgctcaagccgaagcttctggccacgctaaataacgatgattggtgcgatcgcctccagcctgaggagggggaggaggctgaaaccatcagcctgactccgctggataacgcgcattccctgatttctgccttgtgctggcgggcggcctataacgagggatacggctattgggttgtggatagcaaacttgagggtaatccaacgcttattacggtttccggttctgagtatggcgacggcgagatttttatgagccagaaagggcgagggctcggcgattgctgggggacggcgagctggctctgggatggcacaacgttccgcaaaagccgtgaagcgaccacgggaatgtgccgctatcttcgcctcggcgggacatgggatctccccacctgggtgaccgaggttaaaccggcaaagtgaaatcacgcgaccagactctctcccggcacacacgccgacagagaggacagggaaggatcttaacgatcgtccgcgtagcgggatcgccatcgacagcgccagcggcgtcagaaaactgacgccttgttcaaaataacagcgcggctaatgtattgctaactcgaattagtttatgattaagccgttctgttcgttatggaaaatgagtttatggccaaaaccgttgagcaagtcgccagggcgctgggaatctcgattaccaccgtgcgcctggtgctgggtggcaaagctgagcagtatcgcatcagcgccaaaacgcagcagcgtattaatgattacatcgccgagaacgggctggtcgttaaccatatcgcccgcagcctgaagctcaataaaaccgagaccttagggctggtgatcccgcgtttatccaacctgtttttctccaccctggcggaaaagctcgaagcctgctgccgtcaggcggggtatcagctaatgattgcctgcacctacagcgacagcgagcatgaaaacagtctggttgaaggactgctggcgcgcaacgttgacgggctcttcgtggtgccctctacccgggaaacgcagctgcatcaccagaaggtagcgcgcaagcggccgctggtgctgctcgaccgcgattttggcgagagcgacgtgtcgctggtggtgagcgataactacaacggcagcaaaaagctggtgcaggcgatgacccaggcggtggacgtctcgccgattttttttatcgccggggatacccagcagccgtcgatccagcgtcgtctgcagggctacctgagcgagctgcccgccggcaaggagtggatattgtccgccagccataaccgtcaggaagagggcaaacagctgatgctcgattttctccgtcagcaccgcgagccgccgaaggcgtttatcgcctcctccctgcccattctggaagggacgctgagcgcgctgcgggaaacctacggctttattccgtcggatattcccatcggcaccttcgatgaacatcagatgctgggatttctgccgaacgcggtgtggtcgatgcgccaggatgaggacgcctgggcgcagcacgcgtttcatctgatgcagcagaagctgcagggggaaaatgccgatgtgaagatcaccgtgccgatgaccctgattcaccgcccgctgtcggtggagaagcagcggagccagtaaatgacacggcttgtgtgaacacgtcaatccccggctgcgctatgctggccggggctacagataccgcatcctgcgcgcgctggtagcccggataaggcgcgggcgccgcaatccgggaacccttaacgatccctcatcaagtcaatcgctgaacaaaccgcgccgccagcccggcgtccagctccggcggcaggccgctgatcccgacgccgccaatggccagcccgtcgacgatcaccggctcgccacccggcatcgccagcagctgcgggtcgttaaataccgccagctgcagggcgccggcgctgacctcttgcgccagcgttgccgtcggacggcgaaagcgcagggcgctccaggccttgcgctgcgccagctggcgcggtagcggtgggcagcgaacgtgcgcgccaaaggcgatgagctcgccctccggcccgacaaccgccaccgccagcccccgggttcgcgcatcgctttccgtctcctgtaaaaaccgcgcgacctgctggcacacgacgctatcgttcagacggatctggggacagagcgcgtcattgtccggcatcggcgatataccccctaaagtgcagatagaggtcatccagctcgcctttctgcgccgccgtcagcgctacaaacggctcgcgggtggggccggtatcgacggtctctttcgcggcaagatacttcgccgactggaacacgccgcgcgcgaccagctgctccaccacctcgttgatctgctgctgcaggcgctgcgcccgggcgatgtcgccctgttgaaaagcgctgcgcagggcgagaaacagctccggctgtaggttaaccgtggtgccaaccgtggccgtcgcgcccgccgcgaggctggaaaggaagatctcatcgaaaccgttaaaaaagactttctccgggtagcgggcgatcatccgttccagcgaatagaggttatgcgaagtatgcttcacccccagaacctgctcatcgccgagcagcgcgtcggcgctctgggcgtccagctcgacgccggtaaactgcggaatgttatacaaaatcaccggaatcgaaatggcgtccagcactcgacggtagtaggcgataatctcctcgcggctatatttgtagtagtagggcggcaccagcgacaccgcgctggcgccgtcctgctcggcgtgcttcgccagctcgacggcatcccgggtgcgcggcgtccccacgtgggcgatcaccggcacgcgaccgcccgccgactgcaccaacgttgccagcatctgccggcgctcatcgaaacgcagcaacggcccctccccggaggagccgcagcagtaaaagccctcaaccccgcgcgccagctgggcccgggcgatcgcgtccagcgccgcgtagttcaccgactcatcggcgtgcatcggcgtcaccacggcggagataatgccgcgaaaaacctgccatttatcgcttaccatgcggtccagcctccatccaccaccacgttggaaccggtcatatagaccgaggcgtcggagagcaaaaacaccaccgcgccgttgtactcgtgggctttcgccatccgtccgatggggatacggctggtgtagtttttctggaagcgcgggtcctgatcgctgcgctcgacgccggagagggtcagagtattgacgcgaatgccgtcgcgcccccagtaggtggcgcagtagcgggtaaagttatacagcccggactttgccgccgaataggccaccggtttgacgaacggaatgccggtgtcctcttttttgtagctatagatatcctgcacaggggagaccacgccgtagatcgaaccgacgttgatgatcgagccgcctttgccggcctgtttcatgcgcttgccgacctgctgggtcatcaggaaggtgccgaccaggttcacttccaccacctcgcggaacacctcttccggaaactcttcaaacgggccggagacttccggcggcgcgctgggctgggtgtcgacgcccgcgttgttgaccaggccatccgggacgccccacttcgcttcaatgctatccagcacccggttaatgctgtctttatcggtaatattcacttccgcgcacagcaggcggtcggagtccttaatcgcccccagcacgcggtcgacgcgcgcggcatcgacgcgggtggccagcgccgccaccttcgcgccgcggtcgtgtaacgtcttcacgtactgcgcccccagctgtcccaggccgccggtcacgatgatgaccttgtctttaaccgagaataacgtgtcttccattgtcctttcccctcactgcgtggttagattttgtgggttgcgaggtaatcacgatcgagaataatgccgtggcccggcctttcgctcggcacgtagtagccgtccacctcttcgcccgcttcggcgatgatgcgcagatctttccagcgcccgccgtcggtcatctcggcgtatgagatattcggcaccgttgccagcaggctggcgctgagctccatgacaaaatgcggcgtcattggcaggttgtgcgcgcgggcgatggcggcgatatccagatagccggtgatcccgccgacgcggccgagatccgcctggatgtaatccgcgctgccgctctcgatgtactgcgtaaactggtttaagttatagacgttttctcccagcgcgataggcgtggcgctgcgttcgcgcagccgcaggtggccggcgatatcgtcggagggcagcggctcctcaatccacagcagattgagtggctcgaacagcttgaacgcgcgcagcgcctgcgggaagctccagccctggttggcgtccaccgccagcgggaagcccggcactgcttcctgaatcttacgcagccgctccacgtcctcctccagcgtcggtttgcccactttcactttcgccgccaggtagccggtgcttttccagcgtttgacctggtcaatcacttcctcaatggacagatgcaggttgatgccgctgccgtacagcggaacgcgatcgcgtacgcggccaagaatgtcgataatcggcgcattgagggttttacctaacagatcccagtaggcaatatccagcgccgccagggcatgggtggtgacgcccgcgccgccgacgtcgtgtacgtgtttatacgagcgatgccacaggccgcgcggggagagcggctggccaataacgtccgggataatctcggcaatcagcgcggagatggttttcccgcaccagccggaagtgtggctaaagccggtgccgacgtggccgttagaaccgtagacgtcaacaatcgccacttcgatatcggtgacgtggtgaatctgatccccccacgggccttccggcagcggaacgcgggcggtcatcagttcgatattttcaatcacgggcatttttgtgctgttcatctgattccttcctttatgggttcagcgggggccgcccctgcggcccgggcggttaatgtttggaggccggggattcatgcccctccagggcgattgccgggctggcgtcatgttctcgatcgttttcgtcgcccaccgcatggccgaagacttccggcagcaggaagatggaggcgaggaaggcgcagaacggcgcgatagcgataatcatcgaggcgaccggtacgccgaccgcttcaaacagggccgggaagaccagggtggtaacgaaggcggtgaccttgacgatggtgtagccgatgccggaggccaccccgcgatagcgcggttttgccaccagcgagatcaccgtcatgccgctttcggaatcccagtagtggccccacagcattagcgccgcgccgaagatgataaatgcgaagctgctgctgtagacgccccacgccgatatcgaaataccgatggtgaccagcaggaagccgtatttgctcagtcctttatgcccgagcttcggcaacagcagcgggccgacaaatgccgagagcgcggcgatacagttcaccgccagcagggcgaggttattctggatctgcccggaaatcccgatggtgacgaggatcagcggcaggaagaaggagaaggcgtagttttcaaacgactgcacggcgcaggagaaccagccgaacagggtggtgcggcgggtaaacggacgacggaacagatcgtgcagcgtctctttgagcgtcgggtcggcgatagtgacgttttcattgggcagaatgtcgtccagcagacggccatcctgttcgccgtaatattcacgggaggcttttttcgcttcgataaagcggccgcgttcgacgaaccacgctggcgtctccggcagctcccgacgcataaacagcagcaggcaggccgggatcgccgggaccgccagcacgatgcgccagatcatatccgggtgaacatcaagcgccaccagcgtggtgaccagcagaatggcggcgataatccccagcgcgaacataaactgccagcggttagccatcacttcgcgcttgcccttcggcatcacctccatgatgtaggtaaagccgttagccacgtctgcgcccaccgggatcccggcgaggcagcgaataatcgccagccagtacatattgggcgccaggccctgaagaacggcgaagatcgcgaacaggatcatcgaccagaggaaaattttacgccgtccgagcttatcggtcagccagccgccgagcagcgcgccgaccaccgcgccaagttgggtgccggcggcggtaaaaccaagcagccagctgctgggctcataaatatctttcagggcgaataaaataaacgccatggaataaatatcccatgactcaattaataatgcggtgatcattagccatcccgctttggtgcagccaggggcctcctgcagatcgagccgtttctttgccttctggataataaattcaatatgttgctgctgatacatataatcctctcttatccgggcaggcggagagcccgcccggacagatgcgcgttgatccgctctttatgggcgataaagagacgaatgaagcggatgtttgccaggatcgctaacaacgtaaaaattacataagcgaatcagttgttatttcattaataaatgcgcatcgcctgcgataaagactttcatattttgcgtcagcgcctgggcaataaaggcgttcagcacttcggataacacctcctcttctacgtaagccagactgagatggttgctctggtggcccgccattaaatcgtcgcgcgaaaccccgtcgagaacggcgttgagtaatggccactcgtagttggtcgcccggcggcggcgttcgaattcgtcttgcggcagttcgacggcggtgccggtgccgatatgcaggatcacctgggtgccttcgtaatgcgctcgcgcccagataaagcgtccggctttgccttgaccggcgatggtcgagccgccataggggaagaacatcgccggctggcgatagccggtggccccggcgatcccgcctttcagatgggcgaacggcaccgcgccggagatctccagatcccagtagaacgtgccgttgtattcgctaccccagcggatatcgtgaagggtggtttcgctcgccatgcccagcgcgccgagcagctttgccagcatcacctgcgggatggcgctgcccatatccacctcgttgatgcaggggatcggcgcgtccggacagacgatctcgccattttcatccgggatcgggaaacgttccgcgttaccgatggcgccttcggcaaaatccgaggcggcgcagctgtctttgagcccctgctgatactgcacgcccaccgccgtcaggccgaagcgcttcacgaagcgcgccatggcgatcatcatcgcgcactgttccagcacctgctcccgggtcagatccttcgccccgtcggcgccgaaccggaagcgcataccgcgggtctcataccagtcgagacaggcttcgcgcagggcggtcggcaccttgctcatttcaaccagcagcgccgattgcgacagcgactccaccggcatccctacgtcgatcatcgctttttgcgggaacacgccgttgatcatccccatacagaaggtatcgaacagcccgacaatggccttgtgtttgaggatcgactgcccaaccttcacgccaatctgcccggctttgctggccagcagcggcgcgctgggcgcgacaggatgcagatagccgagcttatggctgagatggccgtcgcgcagccaggtgtctaagccgcgaataaacgcctcgtcggcgaaggtttccgaccacagccgcgagtagttgcgctccaggctggtgaggcagcctgccatacagagcatgccgacgaggcccggccaggtaccgtcaaaattggcgagcagcaaaatagggccgcgatgatgtaccagcgaaggagcaaggtgatgggagtattgccaggcggtaagcaggacaataaccggcgcatccggatcgatcccggcgaacagctcgctaccctctttctggctgctgataaacccgtgaccgcgctgctcgttgaccggatgggcgcggcgcaggcgatagcctaatgtttccagcgccgtttccagacgctcttcaaacagcttctgcgtgggccagcaggtgacgttagccggttcgcggagatccgcattggtcaccatcaacacttcgcctggctgcggggtaataagcccggcttccgcgggtaacgttaaattcagcatgtgaatttctcctgtaggggataggtcgcttagttatcgttgagcgtgctgcgccggggtaagcgcggcatcaatcgttctgttgctggctaatttctttggctaactcgaattagcaaattaggataaaaaaagacaggaacaaactctttaccggggatttgtgatggctatcaatgtgcaattattaacttattaatatttaactgtttattttaaacggtgggtcgaggtgacagggaacgcttgctgaggcggcataaaggcgggcagaaaagcggacgggaagcgcagcggggacggtaaatcagcgttaaatatataattagttgaatttaataaattatttacgttatgccgtaagcgatttgtctcgcggcgctggcgcgagtgttaaaatttaaccgatcctggtcacactcttttagcatttacgttgtgaatctccgtatcttgttataattagctaattcgagttagcttgcgggcgattttccctcgccaccgcggttagccaggcgctgcccgacttaacaataatgattcaggacagaggatttaatgatgactatgcttacctcgcccgccatgacccctgcaaaaaatgaacaaacatcgcaacaaacgcatgaaagaagaaagctgctcaccgtgctgggctccggtctttccggcacaacgattgagttctatgacttttttatctacggcaccgccgccgcgctggtgtttccgtcgctgttttttcctaacctctcgccgctgatggcgctgctggtgtccttcctgacgctgtcgattaccttcgtcagccggcccatcggggccatcgtatttggccactatggcgataagatcggccgcaaaaaatcgctggttctgtcgctgatgattatgggtatttcgacttttttcataggcttaatccccagctacgacaccataggcaacgccgcgccgctgatacttatctttttgcgcctctgccagggctttgccatcggcggcgaatggggtggggcgacgacgctgatcaccgagtatgcgccgcgccatcgccggggctttttcggcacttttgttcagttgggcaacgtgcttggcctgtttatcgccaccggcgtttttgcgctggtggtgatgctgccggaggatgacctgatgtcctggggctggcgcgtgcctttcctgttaagcatcgcgctgctgtttgtcgggatgtttatccgctcaaggatcgaagagacgccggtgttccaggagaatcagaaacagcagcagaacgcgccgaaagcggcggagcagaagtttcccattctcaccgtactcaagcatcaccgtaaagcggtgttcctggcgatgggcatgcgcatgggggagattgttctgggctggctgacggtggcgttctttatgtcctatgtgacaagggaactcaacttcactcgcgaaacggcgctgaacgggctgctgctggccagctttgtcggcatttttacctttccgttcttcggctggctttccgataaaattggccgccgaccggtctatctggccggcgccgccatcacgctgatctttgctttcccgctattctggatgatcgattccggctcggtgaagatgtttatgttcgccaccaccttctgctattccgtggggctgggcatgatgttcagcgttcagccggccttcttttcggagctttttgacaccagcgtgcgctataccggcgtctcgctcggctttcagctggcgaacatcgtcggcggcctaacgccgatgatcggtaccttgctgctggtgtggtccggcggcgcatcgtggcccatctcgctgtttctcgcctgcatggcgctgattaccatcctgtgcgtctgcgtgacgcgggaaagctataacgatgagcttaatgaggtgaagaagtagccggggagggttgccccgccatgaccggcggggcgggcgtatcagaacagattaaatttatattcgataatcacttccgaagagagcgagttggcccggctgtaatggccgtcggtaagcaccggcgttttgccattcatcttataggaccagcccggcccgaacatcgcccagacggtgagatttttcagtcttgggtgcgtcggcacccagcggctgaaggcgttaatttccccggtacggacgtggttgccgcggtagttaaactgggcgatgttgccggcgagaccgatcgccagctccggcatcaggttatagtccgacatattagagagaaccagctcaccgtcgcgcatatagtcgttgccggcataggccattgagataaaggtcccgcgcgagtttttactcatatggcgcgggtagaagcccacttcattggccttgtttgcatcggtatagcccagaccccacttggtgctccagttgtccgcctgccacttcacatccatggcgatgtgccaggcgtcgtcgtcaaagtcacgcttattcgctggcatcgctttatactcgtccagcgcgtgagtggcgtagacctgagtaccgatgttcagcgcttttatcggcttaatattggtaaacagaatatggcggcgcagatagttatcgctttcaccatagccgtactgcatgttcaggtgctcgctttgccacagaatatcgccgctggcgatatggttaatgtactgtccgctgttggtctggaagcgtttcttatccggcgagttacgatccatcgcgctttcgatgtacgcaccgcgcagcgtgaaggggccgtagttcaccgcgccggtccagccctggtaggtggtcggagagaggcgggtggagttggagatgacgccaaagtttttcatcgtctgccagccccagcgggcgttcagatgagtgtccgccaggcgatactgtagcttgacgttgcgttgaccaaatttggaaaagccttcagcgttgctctttttattcccgctgccgttgttatacagcacgccgcgggagttaaagtaattgctggcgccgagctttaccgctccgtagtaagtggcatcaaagccaataatatcggcaaaatagccggactgataatcgacggcgacgccctgaccccaggcattatggactttctttggctcggtctcttcttccttaagatatttccagtagtttttaaacgataaattcatatgggactggctgaataacggatcgtcgagcacggtatcgatataatcgtgctccttcaggctgttagtggtcgaagctgaccaggcgctggcgggaatagccagcagcataatggcgactgttgtagtattgattttcataataaaccccagagtagggacgcagcgatccaggcgaggtgttttcgcctgaagtctgccgtaataaataattaagcgtgggtattattttttatcgagagcctgttttccggcttcgacatatttcatggtgccaatttctggaacggtatatttgccgtctttataaacaattttaaccaccgcggcattggcaagcggcttgtttttcgcgttatcgtcggttaaatcggaaatcataatctgcatggcggtaccggatgaaattgccagcacgtttttatcgccccgggcctgcgcgttttcaacgatagtgtgcagggctgcctgggtacgggtttttacctgctgatagttttccgccataccctttgggtcggccgctgccagcgcgttctggttggtatcgacggccagggtgcccgctttcatttggctgaacagcgcagcgccgtctttaagccccagctgtctggcgccggcgtcggccatatctttgttatagccaccttcgaaaccgccgaagaaggcttcccgcaggccgctgagctcagtaagtttgtaatcacttactccggcttgcttaaggatcacctgcatggtttcacgctgacgtccggcatcgctggaatagaagctatcaaacggaatacctttaagcccctcgccgagataacgagcgacgcgaatgccgtcttcggtaagcggtgagtccgcccaaccctgcacgcggtcaaacgtattcagcagcgttttgccatggcgggcgaaatagatattcacgccgtcatcgtttttaacttccgccgcagagcaggttgccgcacctgccgccatcattaatgctattagccacttcttcatataacgctccacctgaatggtctttttataagcaaaaaaaaacctacgtcagatattcgacgcgaagcataaataagattatgttcgctcgaacgtctataacgtaggtttcgcctgttctaaacagtaacaatccaacaagggcgacgttagcactaattatgagaaaagacatcctctatttattatgaatgtcaataaatgtgatcgtcttcatggaggtaattttgttgattgagttgtatcttaagtttaattttcagattaattggcagttttcggcttaaataattttagaggattgatctccgtcacagaataatgatgtccgggctggactcttttacgctctggcgttattttcgcagcactctgggattgttactgaccacaggcaaaacctaagacccctgtccgccaatttggcgtgcggcaggagtcttaggtttttttttgcgcctaagaaatacctctgctacccaacaaggagtgatgatgagaacgaaaatcctgactgccgccattctggcgttatctgccgctggcgtacaggctgctgaaaaaccgctgaaaatactgctggttaacgatgatggctgccagtctgtgggaaccacttcgctgcaggaaaaactggcggccaaagggtatgacgtctggatggtggcgccggcaacgaatcagagcggtatcgggtcggcaattacttttaagacgggtaaagtttttgatgtcaaaaaagccgctgacaaacgctactgcttccctggaactcctgccgatgcgctggattttggcctgtggggcgtgctgaaagaagcgccgccggatctggtgatttcgggcgtcaacgatggtcccaataccggtatggcgcaggttaactccggcaccgtgagcgccgcggcccgcgccgtacgctacggtttcccggcgattgccgccagcattggctaccgcttcacggaagaagagatgaagaacaaatggccgagcacgcataagtactggcctgattcggtggattatgtcgtctcgctggtggataaacttaacgctgcgcataaaccgggaagcccgattatgccgcagggggccgggttgagcattaactatccgccgctgccgtcggctgaaattaagggcgttcattatattgagaatgagcaattccctgtgccgcagattggttatgaacttctggcggacggtaccgccaaacagacgatgaatccggaggcgatgaaaccggcggaaggggataatgactcgggctggctcaataaaggatatattacttacaccctgtttgatggttcatggaacgcgccgcactaccagccgcagtttgaggcgctgctcggtaaatgatgctgtagcgatagtaaagaagaaggcgcgggttccgcgccttctttatatgaaccgatgatgaagctattcgtcgaagaaccagtagccctggttaatcaggcgggtcagatcggcaataaaagccggattgcgcagcgcggcctcgcctagctcctctttacccagcagggtatagcggcacagcgcgtccagagctgcgggatcggttggctccagctgttcgctattcacaaagaagctgtcgccgatgtgcagtacacgcaggccgctcaggcgagtcagcatttcaccgcccgccagcgcgtcgacaatctcctcttcttcaaaaggcggttcagcgggcgcaatatccagctcgtggcgcggcgtggtagcaaaacgcccaaaccagcggcggaaatcttccggctggctaatcatctcgatcatcatgccgcgcaggcgttccagttcatactcttctacccgtcccggatgttcgcggcaggtcaaatccggatcgctgtagtgctcgccgccgagatcgttttccagcgcataatcggcaaagctgctgatcaaatcgcggccgtttggcccacggaagccgacggagtagttcagcgccgtttcgtgagtgattccgtcgtgcgggaatccgggcggaatgtacagaatatcgcctggttgcagatcttcatcaatgatcggcgggaacgggtcaacgtgcagcagcgccggatgcgggcagaactgacgcatcggtagcttatcgcccacgcgccagcggcggctgcccatgccctgaataataaagacgtcgtactggtcgatatgcgggcccacgccgccgcccggtacggaaaaggagatcatcagatcgtctagacgccagtccggcagcacgcggaaggggcgcaccagttcagcggcgggcatatgccagtggtttaccgcctgagccagtagcgaccagccggtttcgcccaggccatcaaaatgttcaaacggcccgttgctggcctgccattgaccgttcttgaggctcaccagtcgactatcgacttccggttccatggccagcccggccagctcatccggcgtaatcggatcgacgaaattcgcgaaagccttctttaatacgaccggctgcttttgccagtacttttctaaaaactcgggccagttaatgttgagttgataagccataggttcataccaataagaagaaacgggcctgattatagaaatatgcaccctcaagccgctttgtcatgggtcaaggctggtgcttaattcatcatctgaagtcacgacgcggtaagagaggggaaaacgtaaagcggataacgttgattttcgcaaaatgtcacttttgcctgaattcgctgcagcccgcgtggcgtctggctttttcccattttttctggcgtggatggggcttgagaagtttaaattatgagcgtttgataagttttttgtattttaagggttgctatatcccggcagctccctataatgcgctcccactgacacggcagatgtgaatcacttcacaaacaaccgggtcggttgaagagaaaaaatcctgaaataacgggttgactctgaaagaggaaagcgtaatatacgccacctcgcaacggtgagcgaaagccgcgttgcactgctctttaacaatttatcagacaatctgtgtgggcactcaaagtgacatggattcttaacgtcgcaagacgaaaaatgaataccaagtctcaaagagtgaacacgtaattcattacgaagtttaattctacgagcatcaaacttaaattgaagagtttgatcatggctcagattgaacgctggcggcaggcctaacacatgcaagtcgaacggtagcacagagagcttgctctcgggtgacgagtggcggacgggtgagtaatgtctgggaaactgcctgatggagggggataactactggaaacggtagctaataccgcataacgtcgcaagaccaaagagggggaccttcgggcctcttgccatcagatgtgcccagatgggattagctagtaggtggggtaacggctcacctaggcgacgatccctagctggtctgagaggatgaccagccacactggaactgagacacggtccagactcctacgggaggcagcagtggggaatattgcacaatgggcgcaagcctgatgcagccatgccgcgtgtatgaagaaggccttcgggttgtaaagtactttcagcggggaggaaggtgctgaggttaataacctcagcaattgacgttacccgcagaagaagcaccggctaactccgtgccagcagccgcggtaatacggagggtgcaagcgttaatcggaattactgggcgtaaagcgcacgcaggcggtctgtcaagtcggatgtgaaatccccgggctcaacctgggaactgcattcgaaactggcaggctggagtcttgtagaggggggtagaattccaggtgtagcggtgaaatgcgtagagatctggaggaataccggtggcgaaggcggccccctggacaaagactgacgctcaggtgcgaaagcgtggggagcaaacaggattagataccctggtagtccacgctgtaaacgatgtcgacttggaggttgttcccttgaggagtggcttccggagctaacgcgttaagtcgaccgcctggggagtacggccgcaaggttaaaactcaaatgaattgacgggggcccgcacaagcggtggagcatgtggtttaattcgatgcaacgcgaagaaccttacctactcttgacatccagagaacttagcagagatgctttggtgccttcgggaactctgagacaggtgctgcatggctgtcgtcagctcgtgttgtgaaatgttgggttaagtcccgcaacgagcgcaacccttatcctttgttgccagcgattcggtcgggaactcaaaggagactgccagtgataaactggaggaaggtggggatgacgtcaagtcatcatggcccttacgagtagggctacacacgtgctacaatggcatatacaaagagaagcgacctcgcgagagcaagcggacctcataaagtatgtcgtagtccggattggagtctgcaactcgactccatgaagtcggaatcgctagtaatcgtggatcagaatgccacggtgaatacgttcccgggccttgtacacaccgcccgtcacaccatgggagtgggttgcaaaagaagtaggtagcttaaccttcgggagggcgcttaccactttgtgattcatgactggggtgaagtcgtaacaaggtaaccgtaggggaacctgcggttggatcacctccttaccttaaagaacctgcctttgtagtgctcacacagattgtctgatagatgtaaagaagcaagacggctgcgaagtcgcgacacctcgtgtccccttcgtctagcggttaggactccgccctttcacggcggcaacaggggttcgaatcccctaggggacgccacttgctggctgtgagtgaaaggcacaaccaaccgatatctcaaaactcatcttcgggtgacgtttgagatatttgctctttaaaaatctggatcaagctgaaaattgaaacgacacacagttaatgtgtgttcgagtctctcaaattttcgcgacacgatgatgttttacgaaacatcttcgggttgtgaggttaagcgactaagcgtacacggtggatgccctggcagtcagaggcgatgaaggacgtgctaatctgcgaaaagcgtcggtaaggtgatatgaaccgttacagccggcgatgtccgaatggggaaacccagtgcaattcgttgcactatcgttaactgaatacataggttaacgaggcgaaccgggggaactgaaacatctaagtaccccgaggaaaagaaatcaaccgagattcccccagtagcggcgagcgaacggggagcagcccggagtctgaatcagcttgtgtgttagtggaagcgtctggaaagtcgcagggtacagggtgatactcccgtacactaaaacacacaggttgtgaactcgaagagtagggcgggacacgtggtatcctgtctgaatatggggggaccatcctccaaggctaaatactcctgactgaccgatagtgaaccagtaccgtgagggaaaggcgaaaagaaccccggcgaggggagtgaaaaagaacctgaaaccgtgtacgtacaagcagtaggagccccaccaccaaagcgtttcgctttgcgtggtgcgcaaaatgcgtaacgacagcgcgatggacggttaacggagcgtaagcgacgttcaacatcaaaaatcaggcagtggagcgttttggggtggggtgactgcgtaccttttgtataatgggtcagcgacttatattctgtagcaaggttaaccgtataggggagccgcagggaaaccgagtcttaactgggcgttaagttgcagggtatagacccgaaacccggtgatctagccatgggcaggttgaaggttgggtaacactaactggaggaccgaaccgactaatgttgaaaaattagcggatgacttgtggctgggggtgaaaggccaatcaaaccgggagatagctggttctccccgaaagctatttaggtagcgcctcgtgaactcatcttcgggggtagagcactgtttcggctagggggtcatcccgacttaccaacccgatgcaaactacgaataccgaagaatgttatcacgggagacacacggcgggtgctaacgtccgtcgtgaagagggaaacaacccagaccgccagctaaggtcccaaagtcatggttaagtgggaaacgatgtgggaaggcccagacagccaggatgttggcttagaagcagccatcatttaaagaaagcgtaatagctcactggtcgagtcggcctgcgcggaagatgtaacggggctaaaccatgcaccgaagctgcggcagcgacactatgtgttgttgggtaggggagcgttctgtaagccgttgaaggtggcctgtgagggttgctggaggtatcagaagtgcgaatgctgacataagtaacgataatgcgggtgaaaaacccgcacgccggaagaccaagggttcctgtccaacgttaatcggggcagggtgagtcgacccctaaggcgaggccgaaaggcgtagtcgatgggaaacaggttaatattcctgtactcggtgttactgcgaaggggggacggagaaggctatgttggccgggcgacggttgtcccggtttaagcatgtaggcggatgttccaggtaaatccggagcgtcactaacgctgaggtgtgatgacgaggcactacggtgctgaagtgacaaatgccctgcttccaggaaaagcctctaagcatcaggtaacatcaaatcgtaccccaaaccgacacaggtggtcaggtagagaataccaaggcgcttgagagaactcgggtgaaggaactaggcaaaatggtgccgtaacttcgggagaaggcacgctgatggtaagtgaagtgacttgctcatgaagctgaaatcagtcgaagataccagctggctgcaactgtttattaaaaacacagcactgtgcaaacacgaaagtggacgtatacggtgtgacgcctgcccggtgccggaaggttaattgatggggttatcctcgcggagaagctcttgatcgaagccccggtaaacggcggccgtaactataacggtcctaaggtagcgaaattccttgtcgggtaagttccgacctgcacgaatggcgtaatgatggccaggctgtctccacccgagactcagtgaaattgaactcgctgtgaagatgcagtgtacccgcggcaagacggaaagaccccgtgaacctttactatagcttgacactgaacactggtccttgatgtgtaggataggtgggaggctttgaagtgcggacgccagtctgcatggagccatccttgaaataccaccctttaatggctggtgttctaacgtgggcccgtaatccgggttgcggacagtgtctggtgggtagtttgactggggcggtctcctcctaaagagtaacggaggagcacgaaggtcagctaatcctggtcggacatcaggaggttagtgcaatggcataagctggcttgactgcgagcgtgacggcgcgagcaggtgcgaaagcaggtcatagtgatccggtggttctgaatggaagggccatcgctcaacggataaaaggtactccggggataacaggctgataccgcccaagagttcatatcgacggcggtgtttggcacctcgatgtcggctcatcacatcctggggctgaagtaggtcccaagggtatggctgttcgccatttaaagtggtacgcgagctgggtttagaacgtcgtgagacagttcggtccctatctgccgtgggcgctggagaattgaggggggctgctcctagtacgagaggaccggagtggacgcatcactggtgttcgggttgtcatgccaatggcattgcccggtagctaaatgcggaagagataagtgctgaaagcatctaagcacgaaacttgccccgagatgagttctccctgaccctttaagggtcctgaaggaacgttgaagacgacgacgttgataggccgggtgtgtaagcgcagcgatgcgttgagctaaccggtactaatgaaccgtgaggcttaaccttacaacgccgaagatgttttggcggattgagaagacaacaatttcagcttagattcagagttgagtacgcaataatttgcgcagcagcaaggcgacaagcgaaggaaaggaaggagcatactgaggtatgtgactgactttacgagcgcgggcaacgcagctgatgcgataaagaattgcgtactgagcacaaagaatttgcctggcggcactagcgcggtggtcccacctgaccccatgccgaactcagaagtgaaacgccgtagcgccgatggtagtgtggggtctccccatgtgagagtagggaactgccaggcatcaaacaagtgaagagcccatcctgacggatgggctttttgcgtttttgtcgcctgagaaatcccgtgtaaaagcccggcagggatcctttaccagacctttgtcacgatagggcatccgcagcacttaagcgaaataggtatatatcgctttgaaataaaaggtttttttaactttacctggcgtcacaacgagaacgatgaatcgtgcggagagcttgccggcaaaaccactgaaagccgtgacggcgaatagcatagatctatttaaacccaattatttatcgaaaactcatctacaaagaatttattttgtgaataaaataattagcatgaacgttatatgaaaataaaaatagagataaacgcgtttctgaatatttaacaggaattatattaagaatattacccgcataacgcttaagttattctaaagtcatcaggttaacaaatagatacgaaaccctctcccctgccgagcacacaggcataacagctggactttttctgcgaaatgacttagtgtccttaacactttgttaactcgatctggtttaagttaattcaaatttgctaaaaacatagggtgcattgcctgtatggaagctaacccggtaacgtcttttgacgaatagtgcatgttaccggctggcaatatgagaatataaatgaaatttctgattaactggcctcctttgcgccaactgatacattatatccgggagcgttttacctttctggtcctgctctgctggccggcgatcatctggctggtttgccgggcgcttgtctggttaacggatggattgatggctcttctgggtaaacccaccgaccactcgtttaccgtgtatcttcagccgcttatgacgctaagtgcgctgctgagaatttccgtcagctgggtgctgctgctgtttatcctgttcagcatggcgatgggattcacctgggctctgcggcgctttatgaatcgccataaatagcgccgatgccgcgaccggcagagcgacatcggtattgcttcaggccatttccccgatcgtcttacgaaaacgcagtagggcgatagtaaaaaacacgccaccgatagccagcagcgtcagaaactgcggccagacgatagagaaatcagcgcctcgataaagaatggcctgcgccaggctgacaaagtgggtcgtcggcatggtgagcataatatcctgtacagcctgcggcatactttcccggggcgtggagccgccggaaagcatctgcagcggcaaaagcaccagaatcatcagcagccccagctgcggcatggaacgcgccaccgtgcccataaaaatgccgattgaggtagtggcaaacaggctcagggccactccaagcataaagagcggtatcgagccttctatcggtacctgcagcacgccctgaaccatcaggatcagggagagtccggaaaccaccagcaccaccagccccattgaccatatcttcgccatcatgatttcaaacggcgtgaccggcataaccagcaggtgctccacggtaccatgctcccgctcgcgtatcagcgccgagccggtcagcacgatcgccagcatggtgatattgttgataattgccatgacggcgccgaaacgctcctgctccaggttcgggttaaaacgcatcctgacggccagctcaaccggcagcgtaccgttgtcccggtagcgggcgacaaagctgttcacctcgccggtgacgatattctggatatagctattgccggtaaacgcctggctcattcgcgtcgcgtcgacgttaacctgtagcgcgggctggcgtccggccagaacatcgcgctggaaatccggcggaatattgatggcgaaagtatagcgccccgcatccagtccggcgtccatctcatcagctgtaatcagctccggcggcaaaaaccagggccggtaaaaaccattgataatacgcgatgaaagctgcgacttatccatgtcggcaatagcgatgggcgccagatgcagcgaacccggcataacggtcgcggaggagtaaaccgagacggtaaaagcaaagacaatcaacgtcagcatcgctttatcgcccagcaggctgcgtagctctttcatccccaaattataaatattgcgtaatccgcgcattatccctcctgttttttcaacagccacacgctcaggcccagcaccagcggaaccgcgataagcagcggaataaaggatccccacaggtcggtcagattcagcgctttggaaaacgttcctcgcgcgatggtcagaaagtggctggttggataaatctggccaatccagcgcccggggccttccagcgaggcgacggggtcgatcatcccggaaaactgcgtcgccgggataagcgtaatgatcgcggtgccgaaaatcgccgcaatctggcttttcataaaggttgaaatcagcaggccaagtccggtggcgatagtgacgtagagcagcgcggcgagggtgagcgtcagaaaactccctttgtgcggtacgccaaaaacaaaaaccgacagcgcgcagagcaggaagaagttgaacatccccagcacgatatacggcacctgtttacccagcagaaattcgctgcgggtggttggcgtcacgtacagattgatgattgaaccaagctctttctcgcggaccacgctgagcgcgctgagcatcgccgggatcatcattaacagcagcggaatcaccgccggtacaatcgccggcaggctcttcacatccgggttatagcgatagcgggtctcgatggaaatcagtgaggtatcgcgattggggctggcctggcgaccggccatctcctgcagccaggccagatgcatggcctgcacgtagccgcgcaccgtctccgcgcggttcggcatcgcaccgtccacccacacgccaatctgcaccggcgttccccgggcgatatcgcggccaaaattaggcggaatttcaatcgctaccgccagctcgccgttgcgcattcttctgtccagttcgctatagctttgcagcggtggctgttcgatgaagtagcgtgagccggcgatattttgcgaccagccctggctactgacggtctggtcgcggtcgagcaccgcaaaccgcagatcttcgacgtccatactgatcccatagcccataataaacatcaggatcacggtgccgagcagtgccagggtcgatcgcaccggatcgcggcgcaactcaagcgcttcgcggcggctgtagctaaacaggcgctgcaggctgaacgcctgacgcggcgccacgctttcggctttatgttccatcgcgggaatcggtgcagcctgcgcatcaggcggctgcgcggcatccgccgcttcctgtagccaggcgataaacgcctcttcaaggctggccgatccgcgctgctccaccagcgcctgcggcgtatcgctggccagcacttttccggcatgcatcagcgaaatgcgatcgcagcgttccgcttcattcataaagtgggtggagataaaaatggtcacccggtcctgacgcgcaagatcgaccatcagctgccagaacatgtcccgggctaccggatcgacgccggaagtgggttcatcaaggattaacatttccgggcggtggatcaccgcgaccgccagcgagaggcgctggcggatacctggcggcagcgaagcgggcagggtgtcctcaacctcttccagcataaagcgctggctcatttcggcgatccgccccgggatctccgcatcagggatgtggaacaggcgggcatgcagctcgaggttttgccgtacggtcagttcgctatagagggagaaggcctgcgacatatagccaacgcggcggcgggtttcgatatccctggggtcgaccggctggccaaacagccacgcctcgccttcgctggccggtagcagcccggtcagcattttcatggtcgttgatttgccgcagccgtttgagccgaggaagccgaaaatctcgccgcgggcaatgcgaaagttgacgtggtcaacggcgacaaattgaccgaagcgcatcgttagcccgcgcgcttcaatcgcaacttcgctttcgtcagcattgcgcggcgggatgatcacctctttatgcgccaggcgctgggcttcgggaagcagggcgataaaggcctgttccagcgtctgactcgccgtgtgcgctttaagctcatcggcgctgccggtcgccagaacttcccccgcgttcatggccaccagccagtcaaagcgctccgcctcctccatgtaagcggtggcgaccaggacgctcatctccggctgacgctggcggatgctgtcgatcagatcccaaaactgcgcccgcgagagaggatcgacgccggtggtgggttcatcgaggatcagcagctgcgggtcgtgaatgagcgcgcagcacaggccgagcttttgcttcatccccccggagagttttcctgccgggcggtcgcgaaacggcgccaggccggtactctggagcagctcattgatgcggatgtcgcgttcggctttatcatggccgaacagacgggcgaagaaatcgacgttttcatagaccgacagggtatggtagaggttcttccccagcccctggggcatccaggcgattttcgggcagacgtcctggcgatgacgtacctcgctcatatcgccgccgagcaccataatgttgccgtgctcaatcacgcgcgcgccggagatcagcgatagcaggctggacttgcccacgccgtcgggcccgatcaggcccaccatacggcgagcgggaatgctcagcgtaatgtccttcagcgcgacggttgcgccaaagtgctggctgacgttttccaggcgggcgacggttttcattgcggcaacctcaccgtcagcgcttcaggccacgcctgctggttatccaggcggacccaggccatcccgggcaggccggtcttcacatactccagatgctccgccagcagctctggcggaatacgggcttttacgcggaacatcagctttagccgttcatcgctggtttccaccgttttaggcgtaaactgcgccacgctggcgacaaaactgatattggcggggatcaccagattctgcgcggcatcgaggataattcgcgcttcgctgcccagcgccagcagacccgcctgctcggtaggcaggaagaaggtcatatagacatcggataaatcgaccatattcagcacccggccgcccgccgccagcacctctcccggttcggctacgcggtactgaatgcggccatcgcgcggggctttcagctcgctatcgtcgatatcggcgataatccgccgttcggtcgcctgggcggcctcgacccgggtttgcgcctgaatgatgctggtgcgcgccgcctcaatcgcggccctggcggcagagacctgcgctttggcggattccagcgccgccctggcgctttctgccgccgcctggtcgtcatccagctgctgcgcggagaccgcgccgcgctgcgagagcgtgctggagcggacgtgacgtttagccgaggagttcagctccgcctgccgctgcttcaccaccgcttccgtagcgcgcatttcgctttggcgctggtcgagcagggctttcgcggcggcaatcgcgctctctgcttccttgatttgcgcggcggcctccagccgttgttcgttgagtacccgggtgtccatacgggccagcacgtcgccctggcgaacaaactgcccctctttgaccaggatggtgtcgatacgcccggcggttttggtggcgatatcgacttcagtggcttcaatcctgccgttactgctggcaaatcctgccggaacccccggcgggcgcagcatccaccatgccgctgcggcaatcaccaccgctaaaccaataacgtatccaacccaacgccgtttgattttgtccatacgcgactcgctttgttccataggctgagtggtgcgcgcttctcctccgcatggcggagtttcgtctcttcagggaagggagaaatcggggataaggccgaccggcgcagggagcctgcagcgctgctaaccggtcagaaagaggtgcgatcaatgtggtcatcatcagcaatcctcgccttaaatgaaacacgcatatttattgctaccgtcaatgtcatactaacacccgcaatgagtatgtccatatacaaagcagggtcttgtcgtcgggttaacataaaaacagcgaggagcgcgatggcacaatattacccataatgcctattggggtgataccggagcagataatcttaatcgttcttcattaaatcatcgtacatataagctattccttagcgctaataaccagaggatattattccctggcgactggcgcatttttaatctggttgccccaggagaactgttgtatgatcggcggccctgaaaatacactcacgccgggcgagcgctttattcaatgaaagatgaaagccaaaaatatatctcgattatttttaaggagtggttgccgctgtacgacagcctgacgccggaagtgagggcggtacttaaaaatattgccgggcagcaggcggaggcgttagcgacccgtttttatgattttattttccaggacccggacattgcgcggcaccttagctatgacttagttcaggagcggctcagcagctcgctggccgggtgggtgaaagatatcctgatgtgcgataaggaaaatctgcaggcgctggcggagcggcagtacctgatcggcagcatccattcacgcattggtattccggcagaggcggtactgcgcggcgcgcgccagctgaaagccgggctgattgaaaatatccgcgatagtcagctcgatcgcgagaccagcgttgccgccatctactacgccatcatggccattaacatggcggtagaaatgatgtgccacgcctataccctgtcgcactatcgggcaacgaaaaatgaagaagcgtaccgcctgtatagcctgatggataacgtgccgctggaatatggcaaacagcaggcctcgctctccggatgggaaaataccgctatttttaatatcgttagcgataataaaagcgatattaacggagcgttattatctgattctgaatttggcctgtggttccgccataaatgcgtgcgttattttaacaaaaatccgcaaatgcaggaaatcgccgacttaattagcaaggtggatgcgctgttatccgcctggaaatcctcgtctgagggttctgagtataaaaacacgcaggctttgctgcaggggatccatatccattgccagcagatcggcagccagatgggggtgctgtttagcagcctgtcgcagatgcaaagcggtaaggatacgctgaccagcctgcttaaccgccgctatctgccggttgtcctcaagcatgaagtgacgctggcgatggaatatgaactgccgatgacggtggcgattatcgacatcgaccactttaaagagatcaatgatagctgggggcacatggtcggcgaccgggcgattaagcacgttgcggagctgctcagcgataatattcgatccagcgattatatcttccgctacggcggcgaggagtttctgctggtgctggtggagaccggcgccgcggaagcctttactatcctcgaacggctgcgtaaaaaaatcagccagctggcgtttagcgttggcgctgacaatgagatttcgattaccgccagcatcggctacgccgtccacaccggtcatccggattacaatctgctgctgcgcgatgccgacagcgcgctgtacgtcgccaagcgcgatgggcgcaactgcgtgaagctgcatgaaggcgacggcaactaagctgccgggtccttcccggaggcggcgcgctgcgcctgtccgggctaccggatcgcagacggctgtgaacccgtagccccggtaaggcgacagccgccaccggggaataaaccgcagaatatcttccggtcgggcgccatcccggaggcggcgcgcagcgcctgtccgggctaccggatcgcagacggcagtaaacccgtagccccggtaaggcgacagccgccaccggggaataaaccgcagaatatcttccggtcgggcgccatcccgggggcggcgcgctgagcctgtcccgcctacctgaccgcagacggctgtgaacctgtagcccgggcaaggcgcctcaggcgccgcccccgggagagatgtggcagcggatttcagtgcggagagatcgccgcgcctcaaaacagcaccggcagccccaggccgcgttttacttcatgcagcgtccgttgcgtcagttcgtgcgcccgttcgcttccccggcgcagcagcgccagcagcatgcctttatcctgaatataggtcgcccggcgttcgcgtatcggcgccagcagctcctgtaagcaggtctccagcgcgtttttgcactgcctgtctcccagccctccgcgccgatagtgggctttcatctcggcaacgaaggtcttatcagcatgaaaggcgtcgagataagtaaagaccacgttgccttctgtctgacccgggtcggcgacccgtaggtgattcgggtcggtatacatggcgctgaccgcacgatggatctcctcttcgctggccgaaagggtgagcgtgttccccagcgatttcgacattttggcgttgccatcaatgcccggcaggcggctgacgtcgctgagcagcgctttgcagtgccgtaagatcggcgtcgtcgtcaggctattcattttgtgcacgatctcattggtctgttcaatcatcggtagctgatcgtcgccgaccggcaccagttcggccttaaaggcggtaatatcggcggcctggcttatgggataggctaaaaatcccaccggcagcgagcgggaaaatcccttctgggcgatttcatttttcaccgtcggattgcgttcaacccgggcgacggtgacgatattcatatacagcgcgctgagttcggccagcgccggcagggcggattgcaggcaaatggtggtcttctgcggatcgatgccgacggcgagataatcggccatcacctcaaggatattgctgctgattttttgcgggttgctgccgttgtcggtcagtccctggagatccgcgacgaggataaactgctggtggtcgtgctggagcagcacgcgctggcgcagggaaccgacgtagtggccgaggtgcagctggccggtaggacggtcgccggtcaggatcgtttggctggtgttcataagtgactccttaggatgctatcaggccgaagggcgacactcagaaacaacaaagccgccttccggcggctttgaatagaggaaacgtcaaatcttgccgcctgttatgcaggcagccaccaacggcggaggtgagagatgacaacgtttctgttcatctttttatcctgccacgaaaagccgcggcagtaaaagcccttttttattcagcgataaactggcagcaggttaaagctggataaaatatgaattattgcgttggcgccgccgaagcacaaaatcaggataatcatggcattgccaccccagacccgatagttcgggctgccgaaacgcctgcgcgaggcgcgcgccagcagggcggggacgatagcggcccagacggtggcggcgagaccggcgaaaccaatggcgtagataaaaccgtcaggccacagcagcccgccggcgatcggcggcagaaaggtcaccagcgcggttttaaaccgccccagccggctatcgtcaaacttaaacagatccgccagataatcaaacaggccaagagtcacgcccaggaacgagctggcgacggcgaagttggaaaagaccgtcagcagtaagtccagggtcgaactgttcagcaggccgcttaaggtctgcaccagcacgtcgatgttgccgcctttttcggcgatagcgataaacgccgggcgcggaatattgcccattgtgccgaccagccagatgatatacagcaccagcgccatcagcgtgccgagcagcaggcagcggcgaatgataagcgggtctttaccgtagtacttcatcaggctggggacgttgccgtgatagccaaaggaggccaggcagaacggcagcgtcatcaggacgtaggggagataggacgcattgacctccgcgcggttaaacagaatcgcgggctccacgtgccacatcagaccgccgaaggtcataaagaaggtgaggattttggcacccagcacgatagtcgtcatccggcttaccgctttcgtacttagccagacgataaaggcgaccaccagcgcgaacgccagcccgcccaggcgtgcgggaaccgcgaggttcatctgcgcaaaagtatgctgaataactgaaccgctggcggaaatataggcgtaggtcaggatatataaaacaaaggcgacggtcaggccgttaataatattccagccgtttcccagtaaatcctttgtaatcgtgtcgaagctggcgccaatatgataattgagattggcttcgaggatcattaacccggaatgcagcatgcaaaaccaggtaaaaatgagcgccagcagcgaccagaaaaaccaggcgccggacatcaccaccggtaaagaaaacatgcctgcgccaataatcgtgccgccgataatcatcgctccgccaatcagcgatggcgtattagttgagaccgcttttgagactgatagtgtagccataaggtgcattcctcacgtggctatatattaaataaggggctgcgggaaaacggctacccggcgcaacccgaataattgagcttaaagagatggaattaaattaatggcgctcttattgcgagagcgccgtgatgcggtttatttcaccggtttcagtctggcgacgaagtggcgcagtaccggcggttcgtaggtgaaggtcaggcccttaatcgtggcggcgcgcgccttaacggcgatcagcgcatcagcgatatagtccatatgatcgttggtataaacccgacgcggaatggtcaggcgcagcagctccatcggcgacgccttctgtttgccggtttccgggtcgcggcccagcagcagggagccgatttccacgctgcggattcccgcttccagatacagctcattgtttagcgcgtgcgccgggaactgctccggtgggatatgcggcagcagcagcttagcatcgacgaacaccgcatggccgccggtcggatactgaatcggaatgccgccttcgcgcaggcgttcaccgaggtattccacctgattgatgcgataagcgaggtaatcctcgttggtcccttcttccaggccgatagccagcgcctccatatcgcgtcccgccaggccgccgtaggtgacaaagccctccatcggcacgcagcggatgcgcacttcgttgaacagatcttcgtcatcgcggaagcagcacaggccgccgatattcaccatcgggtctttcttggcggacatggtcagcatatcgccgtactggtacatctcgagaataatctctttcaccgatttatcggcatagccctcttcgcgctgtttaataaaccaggcgttttcgcagaagcgggcggagtcgattaccaccggaatattgttctggcgcgcaatctgatacacctcgcgcatattcgccagcgataccggctggccgccggagctgttacaggtgacggtagtaataatcgccgccacgttttccgcgccgtgctcggcgatggtcgctttcagcaaatcaatatcaaagttgcctttccagtcgtaccacgaggtcgtgtcgaaggctttcggcgtcaccacgttaatggcttttgcgccgttcagctccacgtgcgcggcggtggtatcgaagtggaagttggaaataaacaccggatgcgccgacttgcggcgagcaatcaggctcgggaacagaatctgctccgcgccgcgcccctgatgggtgggaatggtatacggatagccgataatctctttgaccttttcgcacagatgctgatagttacgcgacccggcgtaggcttcgtcgcccatcatcagcccggcccactgatggtcgctcatcgcgccggtgccggagtcggtcagcaggtcgatatacacgtcctggctattgagcaaaaacgggttatagcccgcctcttccagcgctttgacgcgatcgtcaaaggtagtcatacgaatgttttcgaccattttaatacggaacggctcagggatacgtttcatttattttctccatggggatgctgtgccgcgtttggctatttggcgacaaataaaaagcgcaacaaatagcgactaaacgcagtgctgaattaattttttttagggagtaaacagcagcggagaattaacgagggaagtcgttggagatgcggtgatctaaattataccagtcgtccaggccgccctgggcaatgaggcgataaatcgatttttgcgtcatgacatcgtcctctgtgggtgaagggatgccataaaaataaggtaaaatgagaaaataaccacgattaaaatcacaaaaaataatttatcgataagcggagtataaaaatttgacgctcgtcgtctttttagcgttattgattagcaggcaatggttttttgttttttattacgccaataacggcttattgagtgaggttattagcgccttcaccgcaatcaatgaaggcgcaggcgggacttacatgctggagaagacgttcataatgatgccgcccgagatgatcagcaccatggcgagaatagccgggatatccggtttttgcttataaaggatcattgagcaaatcgtgacgccgacgatgccaaaaccgcaccacagcgagtaggcgacgccgaccggaatggtgctcatcgcgcgggtgagggcgaagtagcacaggccgtaggcgcataccaccagcaccgacggcgccagcttgctgaagccgttggtctttttgatcatcgacgtgccggtgatttcggagccgatagacagcgccagccataaaaatccgaggttaaacataagcggttccttttctgttagttggcgacttttttgtccagagatgcagcggccggctgcgcgggtgcttcctcgctctcttcgctacccattttggaaaaaaggttcatgatcacgatcccgctggcgataaccgccataccgataatggcggcggtgtccgggtgctggccgtaaaacgccattcccagcgtcgataccacgagaatgccggtaccggaccaggtggcgtaggccaggccgacgggaatatccttcaccgcgcgggatagcgagtagtagcaggtgcagtacagcagcaccagcagcccgagcagcagcattttgctcatcccttcactgctgccgaacattttgagggtggaggtagctgaggtttcggaaacgataaccagcagcatccatagccaacactttgtttttgaagacataagttaaactccgggtttactatttaaggtaaggttctttttttctgttttttaaaaaatcgatagcggcatcggtcaactgcgcttcaggggcacaggccagcgccggattattcactacgtctgtgacagtgagataacgccgcggaccgctcgccgacggcgccgtcgctccgcgacccgacgccagcttctccagcaattcgttcatggtgcacagcgcgatgccgcattcggccaggcgggccagcgtggcctgcatatgcccggcgtaagcggtatcaggctgcgccccgcgcagctggttaagctcgctggcgggatcgcagtgatagcgcagcgccagcaccggcaggccgctcagcagggcatcgtgcacgcggcgggtaaccggaccgtgcagggaacccttcaccagatccgccgccagcgggtagtcgagaaacggcagcagcagcgccttatacgaggccgaaggcagcccctgttgccagtcggccgccggcagcgttttaccgatagcccgccactgctctccgtcgtcaatcccgctatccagcgccaggtgcaggctctcgccgcagccggccagccgctggcgaatagcgtgccggtagcccgccgcggcggtcaccatcaccagtaccggcggccgcagacgctggataatgcgttcaaccaggtcttccatctgttggtcggtcatggcgagcctccgttagccgatgagcgtgacctgcgcgccgtttttcaagccggcggcgttggcctcttcggtatcaatatgaaactccagcgcaaagtcttcgcgtacccgcaccaccacttcatcaaaggtcagctggcgttcgccatcgctgcggacgctaaccttctggccgttggcgacgttcagctggcgggcgtcctgcggcgacatatggatatgccgccaggcgcagatcacctgcgatcgcagctcaacgtggcctgccgggccgatcagcagcgcgctgcccgcgttctccagctggccggattcgcgaaccggcgctttgatgccgagggtaaagcagtcggcgcgggagatttccagctgcgataccgggcgggttgggccgaggacgcgaacgttactgagtgagcccttcggaccgaccacggtgacgcactcctgggccgcgaactgccccggctggcgcagcggcttaaacggcgtcaggacgtagcccttgccaaacagcgcttcgacgtcctgctgcgccagatggacgtggcggttagagataccgaccgggatagccggagcagcgtggctcaggcgggcggcgattttttcatggagcagggtgtcgatcatgccttcttccctttcctcatcgccgcgtttttatcttccgtcggcgcaggcgcggcggcgggttcagtgggttcccttgtttccgcagcggcgggcgcgacggcttcagcctcaagcggcgcggcagcttccgcgcgcggcggacggcctttcagggtgctgagggcgtccacgacgctgcgctccggacgggcgatcgtcagggatttaacctgcgggtcgatgagcgcggcgacggacacgccgcgttcgatagcggtgtgaatcgcgctgatctccccttcaaagcagacgctcaccagccccgaaccgactttgcggtagccaatgcaggacacgcctgcgcttttgcaggcggcatccacggcctgaacggcggcaactaaccctcgcgtttcaattacgcctaaacttttcattgtcggctcctgttaatggcggactaagcgaatatcaaaatcaaactgcgtgaagaacgtttccagccggtctaactcctcggcggaataagttgggtctcgggtaatggggtaaggcatatcgaggcgctcatattttttgcgcccgagctggtggtacggcagcatatcgatgcggcggatatttccgcgcttcgccagcttttgtacgtaatcaatggctccggtaatggcatcgaacgagtcgttatagccgcgaaccagcggcatgcggataatgacgttagcgccggagtccaccagccactccaggttgcggcgaatgccttcgttaccgatgccaaataacgctttatggtgctcgctgttaatttgcttaatatcgaataagaaggtgtcggtcaccggcgccagcttttgataattggccagcggcgtggtgccctgcgtttccacggcggtattgagcatcatctttttgcattcgctaaagagcgcgacggcaaaatcggtctgcaggctcatttccccgccgccgatggtgacgccgccgccggaggagatataaaagtcgtagtcctgcatgatgatctccatcagttcgctgacggtgacatctttgcccataatatccagcgcgttctgggtgcagatctcttcgcacttgcggcagccgatacagtctttattacggttgacgaaatgcttcatttcgccgttttcttccgcccgataatgaattcccgccgggcagacgttgacgcagtcgccgcagttaatgcatttatcctgtgagaacatcacctgaaactggctattcagcccttccgggttagcgcaccacgggcagcgaatattgcagcctttgaaaaaaaccagcgtgcggatcccatcgccgtcatagatcgaatatttctgaatattgaatattcgcccggttaattcttgttttgcgctcacacatacctccagaaaaacgatcgggacatccgtgtccaaaaacgtccgtgtctttatcagaacttctcgatgaccgtacggctgataatctcgtcctgaacttctttacacagctcaacgaagtaggcgctgtagcccgcgacgcggacgatcaggtcgcggtatttttccggctcctgctgggcttttttcagcacttcgttatcgacatagctgaactgcatctggccgttgccgagaatcgacgcggtgcgcagcagggtaatcaggccgtgacgaccttccggggtatccagcagccctttgaggaacttgaagttgtgcaccatgccgatgttcatggtttcgacgttcatcttgctcaccgacttgatgatcgccgtcggaccctgcttatccgcgccctgagtcgggctgatgccgtcggagagcggcatccacgccaggcgaccgttcggcgtggcgttggtcagctcgccgatcggcgtgttgttggagatggacagggtgccgtggctcagggtggagtagagcatcttgtacttacggcactcgcgctcggtccactcggtgatatccagcgcataccgatcgacgtagttatcgtcgttgccgtatttcggcgcgttgaggcagtcgcggcgcaggccttcaaagccttcgaagttcgccagcagcgcgtcgcgcacctgctcgagggtgtatttcttctcttcaaacaccagcttacgaatcgccgccatggagtcgacgtaggtcgccagaccggagaagatcagccccgggccgtggttgatcatcgcgccgccggcggcaacgtctttgcctttttccatgcagccttccaccagcagcgacatcagcggcttcggcgccacgtcgcggtgcacgcgctggctgatgaccgtcccgatcgccgacaggcgtacgatatgggcgatctgttttttcaccgccgcgtcgaaatcctcgaaggtgtgcaggtcgcgcaggtcgccggtatccagcccctgatagctgtcaaacagcaccatccggccgcggtttaaaacgaactcaatggcgatgggccactgggtgtagccggtggaggtccactgatagatgcggccggatttctgcggctcgacgcagcccatcagacagtagtcgcgggcgtcttcgaaatcgaagcctttacgcagcatcattttgatatgggagtcgtcgaagtggcaggccgggaagcccatccccgctttgacgacgtcgacgattttttccatatacttctgcggcgactggttgtgaatacggcaggccagcgacggctggtaaaccttcacgaagcgcacggcgtccatgatcaggtaggtcaggtcgttacaggcatcgccgccggagcgcttctgaccgccgacggtcaggttgataaacggctgatagccggcgaaatatttcgcccccagctcgctggacatccacatcagctcggcgcatttgatgataaacgcctgcagcagctccagcgcggtgtcgtgagtcaggcggccttcgcggatatcggcttcaaacatcgggtagcagtactggtctacgcgtcccagggacagtccggtctggttctcttcaatttcaaacagcgactctacggtccagatgctctgcagcgcttcctgcagggttttcggcggattcgccggcacgttctggttcacctcggcgatggtcagcagctcggcgcgacgctgggcgttctgctcaatcgcggccagttcgcgggcgcgggcggcgatgcggtgcgcgtagttaatcaccccttcgcaggtttcaatggccgctttgtagtagtagatgcggtcgatatcttccgggttttccatgctcaggctggcgagatgcgcctcggcgtcggctttaatgccgttcatccctttggtaaacagcagcacatcgtagcccgggcaggtgtcgccgccgccgttgatctggtggtaggagaggtcgctgacgaaggtctcgccgctgaacgcccatacgcccgcttcgcggtactgggcttcgcagatttcatccagcgagcggccttcccagaacggcacgatctcttcgcggatggtttttttatctgcttcgctgatctcaaacggatcctgcggacgggtgctcatggtatcgagttcgtcgcgcacccagcgccaggcgatatccggcgagaaggcgcccgcgcgcggcttgccgcacggatgaccgacgatcagctcatcgtcctgaatcagaatcggcgcggtttcgcaggcgtgacggaaggctttggcgcgcagcagaatcgtcggcatgccggggttggctttgaccacttcggtaaaggccagcgcgcggtagatagagacgctcgggcgcacggtcaggtagtggttacgcaggcgctgcatgcgcggggtcagcccttctgctgccggcgtctcgccggcggcggcaaacggggcggcggaaacgtgctggacgcccttgaacaaacgcaccggcagatgcagggcgctcaggttgtgctgcgcgctgaggaacatgtcggagagttcgttaatgcgcgcgttctcaaggcttgcgccgtggagcagggcgtcgaacatcggataaccgtcgatcgcgcaggcggcgcgcacttcgcacagctccgccagcttgaaccacagcgattcgacgatttcatacgcctgctgcggggagagcgcgccgttgttgatatcgtgctggtagtaaggcaacagggctttgtcggcgccttccgggttgacggcgtagctgccgttatcgagctggagcgccagctggaacagataaaaggcctggcacgcctctttgaagctgcgcgccgggtgagccggaacgtggtgcagaatggcggcgctgtccagcagttccgcccggcggtaagcgttggtttccgcggcggccagctgttccgcgctgttggccaggttttgcgccagcgccagcagggcatcgcaggcgtagatggccgcgcggcagccgttgacttcatccatgccgctgcggctgacggcgctgcccagcgcgcgggttttctcttccagctgatgttttatcgccagcacgcctttttccatcaccagcttgtaatccggggagtcgagatcgctattcaggttgaggaactggaacgcggacgggcgacggacggcgctctcgtcgtggaaaatcgccccgtgcggtttgcgggtctggttgccgacgatcagctcgtcggcgctgatgcacagcggcagctggcgcatcagttcatagaagcggcgcgccggtttgacggcggcgggaaccccggcgatatcgccatcaagggcgttgagcgtggtggcatgttcggtgcacagggtgcttttttgtgagagtaaacgttctgccaacactttgacgcgcggcgttaagctgtagtgtgccataggtaaggttctccaaatcttgttatcagtggccctgaacggcgttgccggtccatgcccggcgatagagttcggtcagtgcgtgagcgtccggcgcgcgtgggttcgtcggggtacagctgtcgcgtagcgcctggccgaccatctccgccagccgctgttcaaattcggcggcaatgacgccggtatcacgaatgccgcccggcatgctcatttcgtcttttagcgcctgaatggcgaccagcaggctggcgacgccctggcgggtagtggccgcgggcagatccagcagatgggctaatcgggcgtatttgcgggcggcatcggtatcgcactgcccgtgataatcggcgttccaggccaccacgtccgccatcagcagggcgttagcgcggccgtgggggacgcgaaacacgccgccgagcgcgtgggcaaggctgtgggtgatgcccagcgaggcgttggtgaaagccatgcccgccatgcaggaggcgttgtgcatcttttcccgcgccagcaggtcgccaccgttgcgccagcaggtcggcagaaaacgaaatacctgctgcaccactttctccgccagcgcatcggaaaagtcgctggcggcgagggagacataggcttccagcgcgtgacacagcacgtccatcccggtatcggcggtgatcgccggcggcaccgaggccaccagcgccgggtcaagaatggcgatatccggcagcagcgacgggtccaccagcaccagcttctcggcgtgggctttcaccacagaaaaggcggtgacctcagagccggtgccgctggtggtggggatcgccacaaagcagggcggctcgcggtgagcgttcggacgggtttgcgccagggcgaaaataaccgctttggctgcatcaatcaccgaaccgccgcccagcgcgataaccagatccggatagctgttatccatccgcttcataccgcgcactacggtggcgatatccgggtcggccaccacgtcgtcccagacctggtaagcgatgccgcgcgcattgaggatctgcgtgacgcgatcggcgaggccaaacttaaccatcgcctggtcagtgaccagcagtacgttgcgggcgggcagctcgttcaggatggcaagcgcatcctgaccaaagcgaatccggggtttcagcaaaaattcactcattgggttattgactccttaagcgtcccgaaacacgttctcgacaatggcgaccaccgacatggccttgtagcgctctttgttgagcgccaggtactcttcggccagcacgatgtcgtgcataccggcgccgacgctatcaacggcaacccaggtctggtctttcatcggctgctggtcatcatctaatttgacgatcagcagcaggttgctgccccgtagctcatcgcacttctgcgtggcgacgacatgtccgactacctttgcgagaatcattgttttttatcgccttatatcaatgtgttacttaccaaggcgttccagcacctggcggatgacgcgttccacgttttgctcattaatctcgctgtccgcgccgacggcggcggcagacgcaaagcgatcgtcggcgctggccgggtgggctgcggtggcagcggtcgccggggcgttaaagcgctcatcgtcgaagatgctgcggttcgggccggccgccgggctgacgatggtcggctgcggttccgggcggctgcccggcgcgcgcagctcatcgatggagcgcacgccgtagcccactttgcggatgttgagcaggttcatcggcccgacgttgtctgagctggagccgccgccgaccgcgccgcagccgagggtcagggccggggtgatattggtggtcgcgccgatgccgcccagcgccgccggggtgttgatcagaatgcggttaaccggtttttccaggcagaactggcggatgacgtcctggttgcgggtgtggatcaccagcgtgtggccgaggccttcgttggtcagcagctccacgacgcggtggcaggcggctttccagtcctcttcgacgtacaggccgagtaccgggcacagtttttcccgcgagtaggggttggaatgcgataccgtggcctgctcggcaatcagcacccgggtgctggccgggacgcagaagccggccatctggctcagatagagcgcggttttaccgaccactttagggttgatggtgccgttggggcgcagcagcagggccgccatttttgccgcttcgctttcgttcatgaagtacgcgccctgggcttccagttcgcggtggacttcgtcgtagatacagcgttcgacgataatcgactgctcggaggcgcagatcacgccgttatcgaaggttttactggtgatgatatctttcaccgcgtgggggatatcggcgctgcgttcgataaacgccgggccgttacccgggccgccgctaatggtcggcgtgccggacgcgtaggcggcgcgcaccatgccttcgccgccggtcgccaggatcagcgacacgtctttgctgtgcatcagctctgaggtggcttcgagggtcagctggctaatggcgtcgacgctaccggcaggtgcccctgccgcttccgccgcgcgcttcacgatttcaatcgctttccagctgcactggcgggcgccgggatgcggggagaagataatcgcgttgccggccttcagggcaatcagcgttttgtagatgacggtggaggtcgggttggtcgatggcaccagcgcacaaatcacccccagcggcacgcccacgtccatcactttttgtagcggatcgtcatgaatgatgccgacggtcttcatatctttgatggcgtcgtagacgcgcagcgaggcgaagcggttcttcagcactttgtcctgccagttgccaaaaccggtttcttccgcggccattttcgccagcgcttcggcatgatgcgccgcttcctgggccacgttcttcacgatggcgtcgatttgctgctgcgaaaaggtggccagaatcgcctgcgcctttttggcattgcgcaccagctcccgggcgttctgccgggactgcaaatcgttatccagttcaatcatgagtctatccttcatcagactaaaagagtggagacggggcgcgccctgtcaggtcatgctttgtgctgcgccgcgattttttcgatgtcgttatgcggacgcgcgatgacgcgagaggtgacgacttcgccgatgcgttttgccgcttccacgccggaatccaccgcggcattcaccgcgccgacgtcgcctttcaccatcgcggtgacgaggccggagccgacgttttcatagccaatcagctccacgttggcggctttacacatcgcatccgccgcttcaatacaggccaccagccctttggtttcgataagccctagcgcttctttcatcaggtttttctccggttaatccatgattttgtaatgcgagacgattttgttgatgtcgttatgcgggcgggcgataaccagcgaagtcaccacttcaccgatgcgctgcgcggattcgacgccggaatccaccgccgctttcaccgcgccgacatcgcctttcaccatcgcggtgacgaggccggagccgacgttttcatagccaatcagttccacgttggcggctttacacatcgcatccgccgcttcgatacaggccaccagccctttggtttcaatcagacctaatgcatcacccatttgcgttctcctggccatcaggccttgtgtttaatgacgattttgttgatgtcgttatgcggacgagcgataaccagcgaggtcactacttcaccgatgcgctgcgcggattcgacgccggaatccaccgccgctttcactgcaccgacgtcgcccttcaccatcacggtcaccagccccgagccgatgttttcatagctaatcagctcgacgttggcggctttacacatcgcatccgcggcttcaatgcaggccaccagacctttggtttcgataagccctaatgcatcacccatggtttctcctccagaacagttttgtgattcggaaaaccgaccgcgtaacggcgtcaggacgcggatgcggcgttcggaattcactatagggaatggcgagtgaagtgaaatttaaatctgctagcgtggtatttttagtcttttgctctgtgatttaggttggttaaggcgctgatttatgcatttatgctgcgatggcggggcgaattcagtgacgattgtggcgcttttttcaccatttagccggaggcggattgatgttaataagttgctaatttattgcagatcgggggtaatttgacgatatatgaagtgtggagaggatcgcgttttcttcggcaggctaaatgcaaaacgtgcggttttactcacgggaaagcgaggaaggaaaagcgggtgtgagcttagtcaagcttgctgccggacttcagcgtgcagacgtagagcggggagttgatagaactgagaagaatggctttctcattgagcttctgcgcgttgagaaacaggccatcgtggctgtcggacatctcgcgcataaaatagtcgaagattacgtccggcgactcatcgatggacgaggcgctggattcccacttgctgatgcgatagtggcgctcggtggtggagatgcgtttgctggtgtagctaaatttgacgtagcgctggagataaagccagccggcggcggaatcggtgtagccctcgacgaccatcgaccctttgccgttggcggcaaagttgaaatggatattgccgttaacgttctccttctccatgttctcaaagcgcataatcgctttggtcgagcagctcatcaccccgccgttctcgaccggcagcagcttccaggcgcagaacccggcggcggcaataaataccaggctggagagggcgaaaaaggggcgcggggcgagtctcattgcggtttccatgaatagtaaaaatagttatcgcagtagctgaacgggttatcttcatgcatcgcgcagtgggcgaggaatacccggcccaggccgttggtttccagccggtcgccatagaagaagacgaagcgttcgccgggcttgcattccagcttcaggcgctggcgcacggcatcaaaattcttgccgtaggcggttccggcaacggagcgcagcatctcatcgctggccagcagctcgcactggctgtggcgcatttgcgtcagggtgatggggtgcgatgtgctgccgccgagaaaactgcagaccaccagcagcagggcgatggtgagcaggcagccgccggcgagataccagcaggtaccgcgcgcgtggcggctggaaacggtcttttgctcttccgggaccgcggccgggtctggctcggcttctgccgcgggcggcggctccggctccgggctggcgtcgagcctctcgatggtgagatccggattgagctgcagcagtccgcgcgacacggtgacgataatgttgtcgatatcgtagtggcgaaaggttttgcgcagcatgctcaggtactgattgagattgctgttggatgaggttaacccgttgtcatcccagacttttttaagcacctcatcgcggctgaccacctcggtgtggcgcaggaagaaccacagcagcgcgttggcggtgatggacagctggctgtccgcctcatcgcttcccggtaacgttagcgtgccgtccattgcatcataaataagacggccatggatgttatagcgcatcgtggcctcaatctatcacgtcatacttcacgttgctggtgcgttggctgcgttcgctcaccttggtcacatagttatctatgctcccagggattcgctcccttgccgccttcctgcaacgcgaattatttagtgtatatatgcttcacgcaggaagcgtcatcttcgtcagatcgctgaccagcgactgccggtgcccggggctcatggtgcgcccctcggttaattccgatagccagatgccgtccgccgcatagcgcaccagcgtgccggtatggctattgtccagttcatcgcctttcgccagatggtccagcatccagtcgcgccagcattttcgcagcaccggttcatccggcatggccagcgacagcaccatcagctggcggctctcctgggtatccgtgagttccggcgccgacagatagcgcagataggcgcgggtaaagcggccataagagacgttatccgcggccataagctctgcaatcgcctcttccataatcgccagcaggcgggcaaagagggcgaaaatcagcgcctgcttgttggggaaatggtgcagtaaaccgcctttgctgacgcccgcttcgcgcgcgacggcgttcagcgacagcgaggcgataccgtcccggccggcgatggtggcggcggattccagcagttgtttatgcaggcggacgggatcttttttacgatgttgggcttccatattcatggcccgaatcataccgaccagacggtatgattattcttgatcgctatcaatatgcgaaggggcgcagctggatgggatgacgttattgcgtggaggctcacagttcaccttatgaattgtggtgatattcgctgcgccgcgaatatcacccaccgagattcacacaggcttcacgtggatagcgaggccgttttcgcccggcgccagatccggacgcaggttcagagaggggatcagatagtcgccgtgattctgccgacggaagggaatgggcggcgtttcggagagggtatccagccgccgggccagcgcctcgcgcagcgtggcgaagcgctgttcatcgagtttgtcggtgcggtagaacaccaccggcggcagcacatcaaagccgggatagaacagcatcccgtgctgaatggggaacaggatgtcgtcgatagacccgttaattccgcgcggcgcgtagtgctccgcccatccgccggtggtaacgaccagcatcgcccgtttccccgcgaacgtgccttcgccgtagcgatcgccccagtgggtttcgctgtgctcgccgacgccgtaggcaaagccgtaagcgtagacccgatcaatccagcccttcatgatggcgggcagcgaaaaccaccacagcgggaactgaaaaatcaccgtatcggcccacagcagcttctcctgttcgcccacgatatccgcgctttgcgtgccgttagcgaaggcgtactgcgaatcccgcgttgcccgccagctttcaccgaccggcggcgcgctgctgtcatcggcatcaaatcccgccttccagcgcatggcgtagagatcggacacctgcacgtcgtggccggcgttttgcagatgctgcacggtaaaatctttcagcgcgccgttaagcgaatgcggttcaggatgggcgtaaaccagtagtattttcattgaaatcacctctgagcaatggagagctgcagagtagagtcggcgacgctatagtagaaatgaattgcttcaataacaggtatagcgatgattaatctccaggggctggatctcaatttgctgcgcacgctgaacgttctgctcagcgaaaataacgtcacccgcgcggcgcagcgcctcaacctatcgcagccgtcggtcagcgtgcagctggggcgactgcgggagattttcgccgacccgctgctgctgccgggaccgcgcggaatgcagcccaccgcccgcgccgatgaactacgcgggccgctgcgcgatgcgctgctggcgctggagctggcggtagcgccggttcagcctttcgacccggccacggcggcgcagacctggcgggtggcggcgacggactatatggcgtcggcgattttgctgccggtgctcagtaccctgcgcatcgcctctccggccagccgcctggcgctgtttgagctacagcccgcgcggctggtacagcaggcggatcgcgacgaagtggatctattttttcacacgcgagacggcgcgccgcccgggctgcatcagcgtttgttgttccgcgaacgctacgtgctggcgggtagagcggggcacccggcgctgcggtcggcgttaagcctggcgcagttctgccagctggagcaggtgattgtctccccggacggcggtggattcagcgccgcgaccgatagcgcgctggcgaatctcgggctggcgcggcgggttgtcctttccgtgccacatttcctgtttatgctggagacgctgcgcaatagcgagctggtggcggtgctgccggagcggctggtgcgtggcgctggcggcctgacggtggttgaaccgccgctggcggtcgccgggtttgagatgctgatgctgtggcacgagcgctggcaccgcgatccggcgcaccggtggctgcgccagcaaatcgtaacgtcattagaggaaaagccatgttaagcggattaaatcatctgaccctggcggttagccagctggcgccgagcgtggcgttttatcagcagcttccggggatgacgctgcgcgcgcgctgggataacggcgcatatttttcctgcggcgacctctggctgtgcctgtcgctggacccgcagcggcgcgtcatttcgccggaggagagcgactacacccactacgcgttcagcattgcggaggcggatttcgcgctttttgccgggcgcctgaatgcggctggcgtcccggtatggaaaaccaataaaagcgaaggcgcgtcgcactattttctcgacccggacggccacaagctggagctgcacgttggcaatctcgcccagcgcctggcggcgtgccgggcgaagccctataaaggtatggtgttttttggcgaggacgaacaggcggccgggaacccgtagcccggtcagcgcagcgcgagccggggaaaagtggaggctgtattgcgcgttgtttccccggaggcggcgcttgacgcgccttgtccgggctaccggcccgagcgctcgggtagcgcggctaaacgcagcgtgagccgggaacatcctttacaattcctgctttaaaaatgtgaagttttttccaacattgagagtattatcgctggataattgtctatacttttttgtatatacaatcaggatgaatatgatgccaatggagtttgaatgggatgcaaacaaggcaagaagtaatctaagaaaacatggaatccggtttgaagaagcggtgctcgtctttgacgatccccggcatctttcccgacaggatcgttatgagaatggtgaatatcgctggcaaactctcggcctcgttcatggggtcattgttatcatggttgcgcattcggtccgttttgaaagtggaacagaggtcattcgtattatcagcgcccggaaggcggacagcaaagagagaaatcgttatgaacatggttaaacataaacgtgacaatccggatacgcttacggctaagcgagacgatgagcttaaagcgctggccaacaaaacggatgatgaaatcgattatagcgatattcccgccacagacgacgcacagtggtcagatgccgtacgcggtaaattttaccgaccgctaaaaactcaggcttctgtccgtattgatgccgatattatggagtggcttaaacgtcccgggaaaggttatcaaacgcgactgaatgcgatcttaagagaagcgatgattcgcgatcttaacaagaaatagcctgcctcatgattaccccggaggcggcgcttgacgcgccttctccgggctaccggcccgcagacggctggggaacccgtagcccggctaagcgcagcgcgagccggggagataaatcgcgttagccttccagcttcagttccacattgcgcttgagcaccaggcgcatcagcaggtaatagaccacgccaaccgccagccagctcagccccagcaccttcgcctgcgcgtccatttcataaataacaaagccgataatgcacagccccaccaccgggaacagcaggtgtaccaccagattgcgcgatttctggcgaatgatgtaatggtttatcacggcaatgtgcagcaccaggaagcccatcagcgcgccgaagttcaccagacggctgaggttatcgatatcgccgtagaaccacaggccggaagccagcgaaatcagcgccacaaacagagtgctgacgtaaggcgttttcagccgtgggtgcactttcgccagcagctgcggcagctgcttatcgcgcgccatcgcaaacagaatacgcgacacggcggcctgcgccaccagggcgttggctatcccccaggagatcaccgtcgaccacatggtgacatacttcagccagccgccgcccgccagattcgcggtatcgtagaaggcggtatcgaggctgttgaacgtcatcccctgcgccagatcggcggcaatccacgtctgcaggataaacagcgaaccgaccagcatcagcgcgcccagcgacgccttacccacggtatctacgccgcctttcgtttcctccgacagcgtggagatcccgtcgaagccgaggaacgagagcacggcgatggagaccgcgcccatcaccagcggcaggctgaacttatcggcgttgtagagcgggtcgagggtcagatggcccgccccggcgccggagtagagcgcaatcagcccgaggacgacgaacaccgacagcaccacgatctccgcgatcagaatcgtgttattggcgcgtgcggtaaaggtaatgccgcgcaggttaatcaggctgttaatcgcgataaagccgacaatccacagccagcccggcacgcccggcagcatgggcgccagcgccgccgcgctgacgatatagagcagcgacggcaccagaatatagtccagcaggatcagccagccggcaaaaaagccgacaatgggatgaatcccgcgctgggcataggcgtataccgagccggaaaccgggaacgcgcgcgacatcgaccagtagctcatggcggtaaagaacatcgccaccataccgataagataggccagcgccaccatgccctgcgcgccgtcccagacgtagccaaagacgccaaacggcgcgatgggcaccataaatatcatgccgtagaccagcaggtcgcggaaggtcagcgcccggtgcagctcctgcttatagccaaactgttcgacgctcatgcctgctccccttcgatgctcagggagagctgttcagccactgatttcggtaaggcataacgacaggttttcagcgggtcgactacctgacagatttgcaggtcgccggcgatgctcagaatactgatcgcttcagccagcgtcagggaggtattgtcggtgataaagtgcgccatattgcgggtggccagggcggcggcatcatcgagggtcagcgccgaggcgagggtaaacagggtctcgctgttttcgagcatcggcagcggcagcttacggtttttaaccactgtcagttcgaccagcacttcgccagggatttccagaccgcagaccgagacttcgccatcgcccatcgcggcgtgtaaatcccccagcccgaacagcgccccgggaacgttgaccggcagccacagggtgctgccggcggtaatcattttgcagtccatattgccgccgtggctatccggcgtgccgcaggagatggcttccccggcaggcgcgacgccgatcacgccgaccatcggattgagcggcacgcgcacgttgccaggcagcacggcatggtcattctcaatgggcacgatagtgaccttcggggcatcaagctcgtcgccaatcactccgagctgcggcgcggtgaccatcaccgcctgctgactgctcagggttatacgcttgatggtcaccttgagcgcatcgcccggctcggcgccctcgacgtagaccggcccggtcgccgggttaatacgctgccagtccagctcgttgaacacggcatcggcggaggtgatttggtcggagaagcagtcgcaggtttcgaacagcacttcactgccgctgctgacggtagcgacaggagcgttatcccgcgacatggcgtaaaccacccgatctttggttattttcatgacattcatcccggttatattgttgcgttttttatatttagagtttcccgtatagggaatgagtgaatttatcgggattatcacaggaaggcaatcaggtcagttttttcaaaaataaatggtatatatttgctggtgaatcatgcggttagctatattggtggggttttcttatatgctggttatttagcaaaaaaactttttgttattttggctttagtggtcattcgctaattgtttactgttatggggttattatccagcatattacgctgcagcgtgcggcagtatgattttaaaatatgcggtgatataagcgcattatggggttttaggtgccgtgagaagagaaatcccggaggcggcgcttgacgcgccttgtccgggctaccggcccgcagacggccggaaccccgtagccccggtcagcgcagcgccgccggggaatatagcttaggccagcttacgtttctgcccggcgatcgcgccgattaacgcctgcacctgcttctgcttgcgcgccgacagcttatgcagctggcgcagagactccaccagttccggctccggctgcttcgcggtaatcacgatacagccttccattactttgatatcgattttggcgccggtggcaaaaccggcggctgccagccactggcctttcatgataatcgccgggatacgctgatgatcttcaaagcggctcgcgtaactgacggtgcctttacggttattttccggggagacttctggatcggtgaattctgcaatagaatgcggggtagtcatggtctctattccttttcaataggggttgtgattagcgaggcgctcgtgttgcagcacgggcgtcttgcgataaatacctgtacatatcatcagggaatagacggaaagtccagctgaaaatgaatgaaaataacggcggggataaagggatggattatttctggtgatgggaataaagcggctatttagccgctttattggtttatgggggcgggttaattgatggcggcgtcggtgagggcgtcggccaggtggagctgagtttgttggctagtttgcagacgaattttaagatcagagcaaatcttgatagccagattcacgaatgctatgcatttttgctgggtagcaatagatggaactataatcggaatttcttcgactactttcttgctgattttaggcattgttcccgatgttccagtcattctgtcccacataaatcccctggctaaaggtgatgatagccaaatagaagcatattcgggtaagagatcttcatttgttcttattttcatcattagatctggataaatgatatttttgtgattttcttttaccaaaacattacagccaacaaaatttgcagagtttcccctttgaattaaaatgtcaccctcattaatatacagatgactgttattatcgatgtcaatatctacaaacttggattcttgtatatttagttctccataagaagttgcaccaagctttaagactttgatccgagtattattttttgattctacaggagaaaacccatttcttgggccaaaagaaagaaacgtttttagctttttatactcgacaacatcactgctttgaaccagtttacccatcaccgccagttgcagaatggtctgttttaaggtgtcaatgctggcttcggtggtgaacagcgtatcgaaatgatcgctgatacgcgcccagttttcggccagttcatcggcgttctggctgtcggttagcgtggttaacagggtttcaaccagctgttgatgggcgtccagactggtcagggtgtgctgttccagttggtcgcagagggacataagttcatttgcccttgagacgatttttagttgttcacttaatggcggtaaaggaaataatattttcgatacaattgcccctgatacttctttaaatgtagtaccacttgcctctgcatctattttttttgctgatgccattaggaagtaatatatatattctgcactatctttgatatatggaacacaagatttaaaaccctggtttgttgatagttctgcatcggctatcgcgacatatccaattggtgctcggctagagaaaagtacactcccttttggcattaacctagctgatgagtttgacagtcctgtgggtgaaatatcacgggctccagacgaaatgtacttccctttgagcccatataggtctgccggagtaagccacttaataccatttttggcccagtattgtggattatctgactttggcgtacctccaccgactatttcacctacggtcgccagtgttacccactcccaccccatcggcagctcaaacggtttctcctcctcgctaatctccggcagcggcttgggctttttaatcttcccctgcttcaccagctcggccttttccgccgcaatgcgtttcagcaattcagacgccggttcatcgttcggatcctgcggcaccagcttgccgcgcaccgccagctccagaatcagctcgcgcagctttttaatcccgtacaggtcaatcttacccgagctgccgcgccctgccgtggagcgggtttgcagcgccgtggtccaggtgtcgatatggtcgacaatcagtttttccaccgccatcagttggcctccttaccggagagcgccgcgccgaggatatcgcgcagctggtggcgcagggtctggatctcctgctgctgcttcgcatactgtgccagcagttcatccggatcgtggctgacggtttccgcctggtgcgggtttttgatatcgaggttaaagctgcggacaatcacctcgtcgatgctgaccttccacgcctgttcgttctcgacgcggctggcgaagccgtcggcctcgttgccccaccagtcgatctcggcctgaaattcttcaaacttcatcggcttggttttgctgtagttcttcacgcccgccgggtacgggtgctcgtagaaccagatctctttggtcggctggcctttggtaaagaacagcaggttggttttgatcccggtatacgggttaaacacgccgttcggcagacgcacgatggtgtgcaggttgcactcctcagtgagcagctttttaatcttggttttcacgccttcgccaaacagcgtgccgtccggcagcaccaccgccgcgcggccgtttttcgccagcacttcaataatcagttgcaggaacagatccgccgtttcgcgtgtctgcatctctgccgggaagttcttctcgatgccgtcttcttcggtgccgccgaacggtgggttggtgacaatcacgtccagctgttcatcccacgacgacagcggcttgttgagggtgttgtcgtgacgaatttgcaccggaacttcgataccgtgcagcagcatattggtggtcgccagcaggtgcgggagctgttttttctccacgccgtggatctgctgttgcagcgtctggtgatcggccacgctctgcacgtagttgttttttacgtgatcgaatgcgcaggcgaggaagccgccggtgccgcaggccggatccataattgactcgccgagcttcggatcaacgcgatcgaccataaagcgggtgacggcgcgcggggtataaaactcaccggcattgcccgccgattgcagatctttgaggatctgttcgtaaatgtcgccgaacaggtggcgctcgctggcgctggtgaagtcgatttcgttcagcttgttgatcacctgacgcagcagggtgccgtttttcatgtagttataggcatcgctgaacgcctgtctgaccacaaagccgcgcgggtttttatcgatgggggcggtgaggtttttcagcgttgggaacaggtcatcgttgacgaactccagcagggaatcaccggtaatgccctcggcgttcgccgcccaggtgcgccacaggtagcgctgcggaatagggtattggtagttatcctgctccagttccagcgcctcttcctgggcgtcaaagattttcaaaaacagcagccaggagagctggccgaggcgctgcgcatcgccgtccacgccggcgtctttgcgcataatgtcctgtaatgatttgataaccgagctgattgacatgatgtgttccatgtttcattaacaataaggccttctgctacgcggtggcagcagaaggcgcaaaaggggagtggttacgcggagcggggcggtaagtggtagatttcgctctccagctcgctgatggcctgattatacccattgcggtcgccgaatccgcttttaatgatctccggcagcgtacccatgctgtcgaacggcttgagcttcagcacctgaatactctctatttcctgcacgcccgcgtcggcgtatttatccagcaacgtattcagcaccgcctgcgcggcgtcggagtatttggtgaagtagttgcgcttgcgcacgttctccgcccgctctttgcgggttaaaggcggctgaccatacaccacgtggcacagcatgtcgaacgggtcgagctctttaccgacctcttccgccagcacttcccagataatcccctgctgttccagctccttgatgatggcctgtttgcgctcggcgccctgccatttgcgggtgaaatcatccagcgaggcgtactctttgagcagcgttttgcgggtgtaatctttgaaggattcggtgaccagcttgccgtcggcgtcgtaatactgcacgcgctgggcgattacgccgacggccacgccgttgacgtgaaacttgcgcactttgttctcgtcctcttccggcagcgggccgacatcgccggaatcggtgacggtatacggggcgggatcttcatcgacaccggtgatgtcgtcttcggtctcttcttcgtgttcgtcaaactgctcttcaaaatcagactccgggtcggcgatatcttgcggcgtggtgtccatcaccttttccgggatgccgtcgaagcgttcgtcggcgaacagttcggtggcctttttgaagtcgaggatggtgaaccatagcttgccgtagcgttcatcgatgcgggtgccgcggccgatgatctgcttgaatttggtcatcgactgaatgttttggtccagtaccaccagtttgcaggttttggcatccacgccggtggtcatcagctcggaggtggtggcgataaccggatactcttttttggggttaataaagttatccagctgggctttgccaatgtcgtcatcgccggtgattttcatcacgtacttgtcgttctttttgacctgttccgggttgagattgaccagcgcacggcgcatccgctccgcgtgatcgatgtcgttacagaagatgatggttttatccatcgggttggtgcgtttgaggtaatcggtaatggttttcgctaccagttcggtgcgctcatcgatcaccatcgtgcggtcaaaatctttctggttgtagatacggtcatcgatcagctcaccgtttttatccgtctgacctttggtcgggcgccagccctggagatcgacgtcgatgtcgacgcgcaccactttatagggagcaaggaagccgtcttcgataccttctttcagcgagtagatatacaccgggtcgccgaagtaatcggtgctggagacttcatgagtctctttcggcgtggcggttaagccaatctgcgtggcggcgctgaaatagtcgaggatttcgcgccacgcgctgtcttccgaggcgctgccgcgatggcattcgtcgatcacaatcaggtcaaagaaatccggcgctacctgtttaaaggctttttgttcttcttccgggccggtgatggcctggtacagcgcgaggtggatttcaaaggccgggtcgatggtgcgcccggtgaccttggtcatcgccgtgccaaacggcaggaagtcgttatttttggtctgatcgaccagaatgttgcgatcggcgaggaacaggatccgcttcttacttttcgctttccataagcgccagatgatctggaaggcggtataggttttgccggtgccggttgccatcaccagcagaacgcggttctgcccggcggaaacggcttcaatcgttttattgatggcctgtagctggtagtagcgcggcgctttgccgctgccgtcgtcgtagtagtcctgagtaatcaccgggagctgggcttcggtgtaaccttttgataagcacaatttttgccacagttccgaaggagaagggaattcgccgagggtaatcggtttttccattagttcgccgtcagcaaccgtggcatcgcggaagataaaaccatcgccgttggtggcgaagacgaaaggaacgtccagcaggcgtgcgtactcaatgccctgctgcatccccttgccgatttcgtgtttgttggctttggcttcaatgaccgccagcggaatgcccggcttgtaatacagcacgatatcggcggatttcaccgttctccgtgccgcgactttgccgcgcacgatgaccttaccatcccggagtttgacctcctgtcggatttgcgttgtgtcgttccagccagcatcgaggatggcgggcataacgcgtttggtgatgatgtctgcttccgtcagggtactcaggttcaggtcagccattggggattctcatcaaatagcgatgcgcaaattctacacacaaaatcagatgaaatcattacactctatgtgcattatttgtcttaagtctctgttttagatgaattcgtgaatcctgtactcaacatataaggttttaatatggaaattattaagatttggaaatcctttcttaaacatttcaaacagaaaaaattagactctgcggtggttatctacggagcgatcgccatctatttaattccctataaatttccgttgaaaaattaccttgttgcgtttctttttatatctattttaatcttcgcatgcactcaagaatttcggcttagagaatatattaacttctttgtacgtacatgcaacgaccatttactgactcgatttgctggtattctatcgctaactgcatggtcaatttttttgcttttattgttgtctgctaatgtgtttgtaaatactataacgtattggttagcgattttcttttcgctcctcatcctcattagcagtattttgacggttttagatattgccagaaataatacagcaaaaactcttaaaataatcggtctggcggttaccgtcttttcaggtgtgtttacatttaccagtagctattcagccagtattttctggcaaattagtaatctggagctatcgtcctctccatggttagaatattgctggaaagccacagcatttcttatgttcttcttgtggttatcacagccaatttgttatggattgtttatcacttacggtgataaagcgaaagggtatcgaatatttacattaaccggcgcctttattatgtcagtttttctgtttctgcttgttcctaaactgtttggtgatgctgcttattatgtgttaaacagaaccatcaattttgaatggcgtgatgaagcaaaatgcggcgatctaaaagtgaagaataaaaatgaaaaatactttggctttaatactgataaatataccgttttttattcagataaaaatgataaatggggtttctatgagcttacttgccaaaaaggcagtaacaggaaagatttttatgcagtcgggtatttacctgaatataatattcccgcgtggttaaaataatagaaacgttttccccggaggcggcgcttgacgcgccttgtccgggctaccggcccgcagacggcggggaaccggtagcaccggccagcgcaacctcactccgcctcccactccatcgccaccttcaacgccattcccagctgcaccatcacctctttatgtttatctgtcggcggcagggcgcagttgatccttaagcagttgcggtatttcccggatgctgaaaacagcgatcccggcgcgacctggattttcagccggcacagctgtttcgcgacgcagaccatatccacctgctccggcagctcgacccacagcataaagccgcctttcgggcgggtaacgcagatcccgcaggggaaaaactcccgcagccagcaggtgtaaatctccatattacgctgatagatctgccgcatccgtcgcacgtggcggtgatagtggccttcgcgaataaagttacaggccgccagttgggtggaggggacgttggtaccgctggcggcatatttcatctgcagcagacgatcgtaataacggccgggggcaatccagccgatgcgcaggccgggagcgatggttttggtaaacgaactgcagagcatcacccggccgtcgatatcccaggaatggatggtgcgcgggcgcgggtattcggtcgccagttcgccgtagatatcatcctcaaaaataacgatatcgtggcgctgggcgaggcatagcgccgcccgcttgcgggcatccggcatgataaatcccagcggattattgcagttggggaccaggatcacccctttgatcggccattgatcgagcgccagctctaacgcctcgatgctgatcccggtttccggatcggtggggatctcgatggtttttagccctaatccgcgcagcatctgcatggtgccgtagtagcaaggggattcgacggcgacgatatcgccgggctggcacaccgacagcagcgccagcgacagcgcgctgtggcagccgctggtgagcaccagatcgttggcggtgaccaccgatccgccgtcgagcatcaggcgggcgatctgttcgcgcagctcgcgacgcccggccagctcgtcgtagttcagcacttcgctcaggttgtgctggattgcccggctcagctcgcgccagataggcttcaggctcggctgagtgacgtccggcgagccgccgccgaaggggataatcgatttatcgtggcgggcgtcgagcatggtcagcacctgatcccactgggtgatctcgacgggacgctggaccggacgcgacatcggcggtaccggcggctgggctttacgcggggccacaaaatagccggatcgcggctgcggtacgatcagctgctgctgttccagcgtctggtaggcctgctgaacggtgctgatgctgacgccgtgttcctggctcaggctgcgtaccgacggcagcttttcgccggggcgatacagcccctgttcgatgcgttctgccagcaggctggccagatgttgatagcgggtcatgctgtatccttgatcgtcgccatacagatcaataaaccagtacagattggcggtaaaaatgaggtctgctgtacgttttagcgaatctgtatgttaaagaaaagtattttgtgaatctgtattgtttgcccgcggatccgtgaagataaagcctctggcaaggtgaggaggtagaggatggaatttcacgagaatcgggcaagacagccgtttatcggcttcgtgtttctggcgcggataatcaaaaaaatggtggcttcgtgaacaaacgcgcagaacattgcagcgtatgagcgacgaacagctaaaagatgtcgggctgcgtcgggatcagatcaattaaaaagtgcgattttttacccggcattttcccggaggcggcgcttgacgcgcctgtccgggctaccagaccgcgcagaactgtagccccggtaagcgtgagcgcgaccggggattttcccggaggcggcgcttgacgcgcctgtccgggctaccataccgcgcagagctgtagccccggtaagcgtgagcgcgaccggggattttcccggaggctgcgcttgacgcgcctgtccgggcgaccagaccgtgcagagctgtagccccggtaagcgcaagcgcgaccggggattttcccggaggcggcgcttgacgcgcctgtccgggcgaccagaccgcgcagagctgtagccccggtaagcgctagcgcgaccggggatgatacattcacagaatttatcaattcatgcttatccactcttcgtttcttgatacttaccatgataagtattattttcctcaccgttaagtgaggaaaaaaagatgaccgaagacgacctgtttgcccgccgcccgatggggatgcgcatggcgatggtggtgcgccagtggcgcgcgattattgattctgccatcaccgacaccggcctgacccagtcaagctggacggtgctgatgcagctgcaccagctgggggataacgtctcggtcagcgagctggcggaggtgcagggcattgaactgccgccgctgatgcgcaccctcacgcagctggaaaagcagggctatctgctgcgttctacatcgccttatgacaaacgcatacgcctgctgacgctgacggcggaaggccgcgctattctggagaagctgaaccgcgtgattgagacctatcaacagcgcgtcaccgaaactatccctgaagcgcagctcgccgcctttagcgctacgttaaatcaaatcgcctgcaatctgcggactatccgcgaagaagataacaagatctaaaacactatgatgacccctgaacagaaatttgcccgctgggtaagggtgagtattgccgccttcctggccatattcgcctggtttatcgtcgccgatatctggatcccgctcacgccggactccaccgtgatgcgcgtggtcacgccggtctcgtcgcgcgtctccggctatgtctcccatgtctatgtgcacaacaacagccaggtgaagaagggcgacctgctctatgaactggatccgacgccgtttatcaataaagtggaagcggcgcagatcgctcttgaacaggcgaagctgagcaaccagcagctggacgcgcagatcgcctctgcccgcgccaacctgcgcaccgcccagtacaccgcgcgcaacgataaggtgaccttcgatcgctaccagcgcctgagcaccatgcagaacgtctctcagtcggatctggataaagtgcgcaccacctggcagaccagcgagcagtcggtcagcgcgctcaacgccagtatccagaatctgctgattcagcgcggcgagcgcgacgatgggcgcaatgtcacgctgcagaagtaccgcaacgcgctggaagaggcgcagcttaacctcggctggacgaaggtccgcgcggagactgacgggatggtgagcaacctgcagcttaaccccggtctgtacgccaccgccgccacgccgctgctggcgctggtgagcaaccagaccgatatcgtcgccgatttccgcgagaagagcctgcgccacaccggcgtcaacaccgatgccgcggtggtgtttgatgcgctgccggggaaagtcttcccggcgcacgtcaccagcagcgatgccggtattctggccgggcaggaagaggtcaatggccagctatcgcagccggagcagtccacccgctgggtgcgcgacgcgcagcgcatgcgcattcacgtcgccctggacgagccgctggataagccgctgcccaccggcgcccgcgcgacggtacagctttataacagcgatggcccgttcgcccgcaccttcgccggcgcgcagatccatctggtgagcttcctgcactatgtctattaataccctggcgcgggtcttcaccccgcacggcaacatcgtctacacggcgaacgattttcgccagacgctgcgcatcgccgtggccggcactatcgcactgagcatttcgaccttctacgacgtacagtacggcgtctttttcgtggtttatccgctgatgctgctgtcgctggtgccggtatttaaccgtcacgtggcgcggcagtttgtgttcagcgcagcggtgaactgcgtcgaaatggtgttaatcgtcggctatctgtcgcagtggccggtgattatgacgctggtggtgtttggcctgtacgtgatgcgctttcgctttatgagccaggggccgctgtttctgctggggtcgatgggcgtggtgtgtcaaagcacgatgctcaactttatgagctatcccaccagtaactggcacaccctgatgttctccaatatggaggcctgcgtgatggcggtggcgcttagcgcattgcttaattacttcatcccggacgttgaaccgcgcaagccgccgccgcgcattgaaaaagatgctgcccgtattcgccacgaatcgctgctctccggcagcgtggcgacaatgatctttgtgatctttcaggtctgcgacctgagcgactcgctgtcggcgctgatggcgggaattttaattctgttcccgatgcactatcgcggcgcggtgattagctcgatctggcgcgtggtgggggtggtgctggcctgcctttatatcctggtggtgcagctgattatctacgacttcagcaatcatatggtgctgatgatgccgctgattggtctcggcctggcgtttagcgcccgcctgcacgtgatggagaaggtgggggccggcgtgggcttcgccagcattaccaccatcggcatcatgttcggccagaacctgcatccggaccaggacctggtgttcagcgatctgtaccgtatcacttccgtcaccgtggcgctgatcgtcacgctgaccatggtcttccttatgcatcggctgctgaactgctttgcgccaacccgattcgtagtgaccgaataagctcaggccgccagcgcccgctgcgcgtcgcgaaaagcgttgtgcagcagccgccacatatgatgcgccgccggggaaaagcggcggtcggagttgcgtagcaggtggcactgggcgctgctggcgatgggatgatcgatggggaccgcggtcagaataccgtgggctattgcttcccgggcggcgtatgcggtcataaaagagatccccaatcccgcctggctcaggctcatggcggtggaaaagaggttgcagcgataggccgggtgaaactgccgtccggcggttttaaacatggcgttcatatggcgctgcaggccaaagctgtcggtgagcgcgatcaggcgatattgcgtgagctcatcgatagtgacggcgggcagggcagcgatgggatgctgtggcgagaccacggcgcagatagggccccactgaaagctgtggcgtttaagctccgggttgccgatagggccgaaggcgaccgccatatccgcttcgccgctggcgatatcgttgagcatctcctgcatgctgccgacaataatatccacgaacacgttaggccaggactgcgcaaaggtgctcatcaccgattcaataaaggtggtgaccagcccgccgccaatcctcaccgagatagtcccgccgcgcatatggcgtaaatccttcaggtggctttccagcttttcccggcgctgacggctttcgtagtagtcctccgccagcagacgtccggcttcggtcagcaccacgtttcgtccctggcgttccagcagcggcagctccagcgcccgttccagctgcgctatctggcggctgatgactgacgggttgatgcccagcatatcggcggcccggcgaatgcctccctgaatcccgacttcatacagatagctcatcggcctctcatgcaacatcgtttctcgctcctttgttgacctgtggtcaacaataacaccctttcacaggtatttatcatcccggcaagttatagataatcgtaattcggacaaaaactgacagggaggaaaattctcatcgcttattcccggcgtgctattaaggcggcaaggctcggggagttgaagaataagaaatagtgatgatgctgattaagggaatatggaaaagcttatcagtgaaaataataaattcgaataacaataaattgacataatttcaaattgcaaacaatcgcactaacatttcattatgtgagaggacagggtatgagtgaaaataaaacgttggaatgttcctccgacgaaacgacaaatgagtggaaagtcgggcccggagcctggatttcactgatcgtcgtattgttagttttctccgggttgctgtttaaggttgagggcatggcctggctgggggcgtttgactttaccaccctcggcggcgcgttcggcaccatgaaaacgccggaaaccaacacctttatcggcagcggcggcatcagcgccaaggccggcttcctgtttgccctgtcgctggtgccgacggtgatgctggcgctggggctgctggagatatttacccactacggcgcgatccgcgcggcgcataagctgctgaccccgctgcttcgcccgctgctcgggatcccgggttataccggcctggcgctgattaccgatttacagagtaccgatgccggcgcggcgctgaccaaagagctgtatgacagcgacaaaataaatcgtaaggatctggttattatgggcgcctggcaatattccggcgccggtctgattaataactacttctcgattggctcagcgcttttcgcttcgttaaccattcctatcattattccgctgcttttaatgtttgtgctgaaatttgtcggcgcggcaatcacgcgtctggttctgaataccgcttataaaagggattttgaaaatgaataattcggcaaaagtcggcagtaacccgttcgatattttcgttatcggcgcgcgcaaaggatttaatatcgccatcaacaatctgatgccgaatgtattaatggcctacgtgatcgctgaaatgctgaatttgctcggcgtgatgcagatcatcggccacgtctgcgcgccgctgatgggcctgtttggcctgccgggtgaagccattaccgtattgctgacctcctggctttccgcctctgcgggaaccggcgtggcggtgagcctgttgagcaaaggcaccctcaacgtggcggatatcacgattctcatcccggcgattttcctcatgggttcgcagcttcagtacatggggcgcctgctcggcgtggcggatgtcccgaaaaaatattggccgctgctgatggcggtgagcattatcaatgccgttatcgccatgctggtcatgcgcgtgattgcataatagaaggcaaggagtaagacgtgtcgcgaactttagagcatttcaactatctgcatcaaatccctgaactgggctttgaggagcacaaaacgtcggcatacatcggcgatgcattagaagccgcggggtttcaggttcagcgcaacgtcggcggcaccaccggcattgttgcgctgctggatagcggtaagccggggccggtcgtggcgctgcgggcggatatggatgcgctgggccatatcatcgatggccgcttagaggctcgccatacctgtggtcatgacggtcactcttcggtggtgttgaccgccgcggaagagatcctcgccgaagggctggtgaagcgcgggaagctgaaaatactctttcagcccgccgaagagctgggcaccggggcgatcgcgctgacggacgcgggcgcgctggacgacgtggagatgctgttcggcttccacctcaggccgctggaggagtgtccgaagggcaaggcggtgtcggcgatgtactactccgcctcggcgacggtgatggtcgatttccacggcaaagccgcgcatgccgcccggcctcacctgggcgttaacgcgctggatgccgcgtcgcacgcggtgcaggcggtaaacgggattcatctggcgccttcgctgacctggagcgctaaagcgacgcgctttctgtgcgatgcgggggtaaccaactcggtgccggcgaaagcgcacgtgtgctgggatctgcgcagtgcggaaaatgacggcatggcgacgctgaaagagcgggtggtgcgggcgatagagagcagcgcggcggcttacggcgccaccgtcgatatccagatcgtcaaggagatgcccgccgcgattatcgacgaacaggctacggctatcgtcagccaggcgatccgggaaacgtttggcgaagccggcttaacggcggcgaagagtacgccgggcagcgaggactttttccactatctgcgcctgcgtccacaggtgaagggcgggttctgggggctgggctgcgacctgctgccggggctgcatcatccggagatgcgcttcgaccgcgccgcgctggcggatggcgtgcgggtgtttaaatcctgcattcgccaactgctgggctgagggaacaaacccggatattgtgctcgctgtacgccgccgggcgatgattcgcgccctggttacgcctgcggcggaaactgagccagcagctgataatcatccccggcgacgcgaaacagggcttccgtttggccggggagaatccacttctgttcttcgcccggctcacagctcagataaatgcaaagcccgcagccgccgcgcagctggcgcggaatgtccttcacccggaaggacgctcccgccgcctgcagggctttgcgcatccgcactacccccaccgttgagtgaaataaaaacagatattccgtcaccggcggctcctgtgacgtaagccgatcagcgccgcgccgatcgccccggcaaactgcgcgtcgggatgcgtttgtaccgccatacccacgtgcccctccagcctccgcgcgaaggtcgcgcagtggctgacgccgccggtaaacagcagcggcccctgcgccgacagacggccgataaaattggcgctgcgtcgggccatggcgttgatcaccccggcgaggatcgcctccggcgtcaccccggccgaacgcaggctgatgacctcggattcggcgaataccgtgcacatgctggtaatcgcatggggttcaataccgtcggtgatgctgtcgagctgctcgacgctggcccccagcgtacgcgagatcacctccagaaagcgcccggtgcccgccgcgcatttatcattcatcagaaaatcggtgagattacccgcctcgtccagctggataaccttgctgtcctggccgccgatatcgatgaccgtgcgggtctgcggggccagcaggcgcgcgccgagcccgtggcacgagatctcggtgacctgcttatcggcgaaatccaccagctggcgaccgtagccggttaaggttaaaaaggggcgctcgctcaggcctgcgcggagcgtttcccacgcttcaacgatggcgtcggcggggcgaaacggcgtcgggcagagaaagcggcgctgaatcacgccgtcttcaagcaggatgcctttggtggcggtcgatccggaatcaatccctacggtaatggtcacgcgcgctcctaaagcatctcgataaaggccgccacgcgggtgctgagctggccgatatccgccgtcgaatagtcggtctcaatggcgatataggggatgttgtgctgctggcgcacgtggcgttttatcgccagcgattccaccgcgtaggtgtggcaggcctgcaaaatgacatccaccacgccgtccgcctgatattcatccaccatctggctgagcagggacaggcgctggtcgttcggcgaaatacaggagcagccgatggcgagatatttatcggtcagggcgtcgtaaacgtcacccgtctcctccacgcagcgctcggtggctttcgcgccggtgcagttttcaaaaccgaccacccagccgccgttgtcctcaatggccttcaccactttttccgccgcgccgccgatcgggcagccggtgatcagaatacgcggccgcgcctccagccgtttgccctcttgccactgctggcgtacccgatcggccatgtcgttgagctcatcgatcagcgccgctttatcgaagcggaaggtcgcgccgtagaccacttttaaaatatcgctgccgctgagcgcgggcgggttgagctgcccgacgcgataaaagttcgccagcgcccgccgttcgcggttcttgaggataatcgcctcgcgcagggcggcttcggtaatcggcgtaccaaagcgatcttccaccaccttctgcaggcgcaaaatttccgctttccacagcgctcgcgaggcatcatcgctggcgctgttcggcagctgcatcacgtgcacggctttgaattcggccatgtattcgtacattttctttttgccgtcgcaggtggtttcgcccaccacgaggtcggaaaagtagaagtaggggcatttgtcggtcttgccaaaaccgtagctgctttttatcagcggacagaggttgcgcggcagatccttttccgcctcttcaatcgtctcgtcggaggtggagcacagcgacaccaccaccgcgccggcggcaagcggaatttcctgcggcataaaggtgcagtaggtgccaaccagcggtatgttttgctctttaagctccatgaccgtgaggaaaccctgctggcgggctgcggagaagtggtcaaaaatggcgggtagatcggtgataagcgacatggttttccttccccgtacacgggagatgatgaaagaggtcgcattataaccctgtttactgtgtgtgtttattgatcttccgctagtagacttttttcagatccatctcttcctgaatccgatcgccccacgcaaggtgggtggcgatggccgcatcaatcccggcgttataaaacattggacccagctctttcgcaataaagtcgacaaagaattccgcgtcaaattgctccagttccagctcaaaattctcttcgcagtatttagacagcttctcgcgcagcaggtcgcgttgcggcgggctgagatcgatatcgctcatggcgttccttaatcaatattgttacggtggatcggggctgctgattatatccgatcgcggagagtcagttgcgatatggcgtgatgtttttggccgtaataaagggtattgatgacctcgctcggcggagaattgtgactgagatcacagtactcccgagaaaacgaagataataggagttattctcgtaactttatgaatttaaatgagataatatgatttttatggtgtgaataacatttagttgcgctcgccttttttcagcatgttcggtatctggatgaataatctatgaacctgatttcaggttatctggcttacggaattttcctataagtacattctgacggcgattcatttatcaggggtgaaggatgaaacgcgtaaaactgaatatgaatgtttttgacgctgctctgatgcgcctggattgggtatttgatactttcgagcaggtctgtttatctttttcgggtggtaaagactcgacggtattatttcatctggcggcagccgttgcgcgtaaaaaagggaaaaagtttgcggtattgttcgtggactgggaagcgcagtatttattaaccatccagcacgtacaaaatatgaaagagcgctatcaggatgtggtaagccgcttttactgggtggcgctgccgatgaccacggtgagcggcgtatcgcagcatgagccggaatgggtcgcctggcgggccggggaagaatgggtgaggcaaccgccggatgacgccatcaccgatgccggtttttccctttttatcagccggaaatgacctttgaagcgtttataccggccttttcccactggctggctgcggggcgcagcctcgcttcgctgatcggcatccgcaccgacgagtcgctgcatcgctatatggcgctcacctcgccgaccaaactgcgctttgaggaagataaaccctggaccaccgcctcgccggaagggttcagctatacctgctatcccctctatgactggcggacccgcgatatctggatctttaatcataagtcgcgcctcccctacaacccgctctatgacctgatgcaccgcgccggcgtaccgctgaaaaatatgcgcgtctgcgagcccttcggccccgagcagcggcgcgggctgtggctctatcacattcttgagccggagacctgggagcggatgtgccgtcgggtatgcggcgcgcacagcggcgcgatttacgccaacgccagcggcgactactttgcgctgaagaccaaaatccgcaaaccggcgcattttagctggcgcgagtatgcgctctttctgctcgacagcatgccggcaaaaaccgccgagcattaccgtaataaaatcgctatttatctgcactggtaccagacccgcggtttccctgtcgatattcccgacgagcaggaaaaagatctcggctatcgcgatgttccctcatggcgccgcatctgcaagacgctgctgaaaaacgatttctggtgccggatgctgtcgttcagcccgacgcagccaaagcactatgagcgctactgtcggctggtgagtaacaaacgtaaagagtggaggacgctttgatgtcgccggatgtggctaagacagtgattgaatatctcgagtcgtttgacgatgttgacctgaaaatcaaagcaattaacgaactgaagagcctgatccaccagcacagtcccttctgccgcgagccggtggactgcgtgctgtgggtcgaggccaaaacggttgaggcgaatgactacaaccccaacgtgatggcgacggtggaaaaaaagctgctggaacgctctatcgaactggatggttttacccaaccggtagtggtggctcgccagcagcgacggcacctggtcgtggacggttttcatcgccatctgattggtaagagtcgcccggagctgaaccggcgcctgcatggttatcttccggtgacgctcatcaatgccgaacgcgaagggcagaaagagcgcatcgccgccaccattcgccataatcgcgccaggggcaaacatcagatcgcggcgatgtccgatatcgtccgcgatttacatcgccagggctgggacgatcggcgcatcggcgaagagctcggtatggatgcagacgaggtgctgcgcctgaaacagatcagcggcctgacggagctgttcgccgacgagagctttagtgaagcctggaccgtggagtagcgcctttcgctactcctgcgccagcgcggcttccggctgctggcgtatccggcttaataaacccgccagacagcacgcggccgcgatccccgccgccacccccagcagatgaaaaggcagcctgccgccgttaaaccacagccagcgcgccgcttcgatagagagcgcgctgacgctgaggatcacgatattcagcgaagcggaaacggtgccctttggcagatcgtttgaaaaaagggtaaagcggaacagcgtcgggaagatcagcccgatgccgaaggcgtagaagcaggtgccgagcaccgaccacagccagacgtgcggccacagcaggttgccgaggatcaggatcgccagcccggtcatctggatgggcaccgcgcgccagataaagcgcggacgcgtcgggtcttttacccagcgcgccaccgacaggttggcaataatcaccgcgctgaagaccggcacctgggtccaggcgaactcggcggtggtcagcccgccgtcgtcaatcaggataaccggcgagaccgcaacccagctcatcagtggaatatagctgagcgagagcgtggcggcgccgaacagaaaaacgcggttgcggaaaacatcgcggaaatcgcgcagcacgccgctggcgctgaaggggacgtcgccgcgccggacggtctccggcatattcagcagcagccccagccaggcgataaaccccatgacggcaataatcccgaacagcactttccagtgcacgaagtgcatcagcgccgcgccggagagcgggccaattattggcgcgatcagcacgatcgaggtaataatcgccatcagcttaatggcttttgtctggccgaatgcctcctgcacggtgacgtagccgaccgtggcgataaaacagatgctggtgccctgaacaaagcgcgcggcgaggaactgctccattgaggtggtgaacagggtcgcgaagcaggccagggtaaagatcagcgcgccggtgagcagcaccggacggcggccgatacgatcggagagcggcccgagcagccactgtagcgccatgccgccggccatatacaggctgaccgaggcgggagccagcgccacgtcggcgtcaaagtcgcgcaccacgtgaataatccccggctggataagatcggtggtcagataggcggcaaagtcatacaggatcagcgccgccgggaagaacagcgtggcggaatggcgggcgaaaaaacgggtcatccattgcaacatcggtgggctccttgttgagtctctacgccataaatagccgtttatgcgcgcactatttcagcacttcacactgcaataaatttagggtcaacctaaatatccatgtgtttttaacggttaatatgtattcatgtaagaaatacattaaaaacaaaaagttgaattaaatatgtaaatgcaacagcgacggaatctgtgaaaacagccacagcagcagaccgatagtgccgccaaccagcgtgccgttgatgcggataaactgcaggtccttaccaatatttagctcgatttgtcgcgacatatcgcgggagtcccagcttttgaccgtatcgctgatatggcgcgtcaggaaggcggcaaactccggggctacccggtgcgccgcctgctcaagatgttcgttcagggattcgcgcagcgcctcatcgtggagcagcgtttcgccaaaccattgaccggcttcggcaatgcgctgcttaatgcgtgaatcgtcgctattaacatcgtttttaacccagccgcgcagatcggcccatacttcacccagatagcggttaaaagtctcatcgtttttcagatacgctttgatattgtccgctttttccgccatcagcggatcggacttcaggttgtcgatcagcttcagcgccgcgcgatcgaaggcctggcggatctgatgggcgcgatcctgactcacttcgtcgagcagcgtgttaaccgcatcggtaaccatttcagcgctgtgctcaccgagccattcggtaggcagcagcctggctttaagcggatgctcggtctccagccagtgcacgataccgcgggcaataaacgcccgcgagctgtcgcgctggagcagagcgatcagctggctaatcagcgaatcgagcagcttctggtggcggttatcgcgcgttaacccttccagcatcatagcgctggtttgggttagatcgaccttatcaatcgctttatgtactgcccgacgcagcaggcgctgaatgcgcgcgtcgtcggttagctccagaaagccgctcatcacctgcagcagatgctggccgacccgacgcgcgttttccggctggctgaaccagttaccaagcatcagcgccggttcatagcgccggatcagcgcgaccagagagggcgtatcgagaaatttttcctgcacgaaatagccgagattatcggcaatccggtccttattacgcggaataatcgccgtatgccgcgcaacgaacggcagcggaatacggcgaaacagcgccacgaccgcaaaccagtccgccagcgcgccgaccattgccgcttcggaaatagcctttagcgcaccgacccatggcgttggcggcagcacgagggtagtgataaaaatggcggctgcaatcagcagcagcgagagcgccagcagcttggcgcgtttcagttcagcgagtttttccataagcttaagcatatagcctgacggcgaactcgtgcaaaaactgccacacaatccaacaaccaaaagccatcaatacgccgccggccgtgcgctcgactcgccagacgacggcggaaaggcggcgctgcaccgacggtagcgcaatcagcgtgaccagcaacagatcccatatcaacaccacgctggtcatccaggctccgctgacggcctgctgcaccagcgtgacgttcgggcccagcagggaggtcatcagcgcgaggtagaacagcgcgtttttcggattgagcagcgaagaacccagcccgagaaaaagctgtttcaccagcggcgggcgcgaagccgaggcgccgtgcagcgccagcgtggtcggacggcttctgagcagcaggctgccaatccacagtaaatacgccgcgcccagcagctcaatcaccgtaaacagcagcggctcctggcgcaggatcccccagccgataatggccagaagaatatacagaccgtttccggcggcaatgccgatacacaggccgacgctgccgcgcaggcggtagcggatggcgtagcccaccagcagaaaaaaatccggcccggggctcagcagggcgacaaaatgggagagcgccagcgcggggaaggcggagggaaagagcgtagcgagtatgtccatagcaacctcagtattaatctgaggtcaccttacgccagcgtaaacgctaattattgtctgttattgatcgggactgcgcatactggcgcggcgtggcggcggtatagctgacaaaggttttatgaaagtggctctggtcggcaaacccggcctggtagccgacatcggcgatagtatccccggcgcgcaggcgcgttttggcgaattcaatccgcgcgatattgataaagctggcgggcgtcaggccggtatcctgcttgaaggcgcggatcagcgtctctttgcgcagcgcaaactcatcggcgaggctatccagcgtcggcggcgcctgcagattggttgccagacgactgaacaaacgcgcgctggtctgactaagcgccacaggcgcgagcgggcgcagcggcaggtcgcgcaggaaccgggcgacgctggcgggtagcgcggcggtgttttgctgagtcatcaacgccacgatctgcagataccgggcaaagagcccggcatcgcgaatcaccggccgggaggttatcagccgctcgtgatgcgcatcgtttgccagctgccgccagcaccagcttagctcgagatagagcatatggtagctgcgcggctggccgtcgcgcggattgcagctgtggggcgcctgggcggggataataatcagatcgcccggccgcagcagatactcctgcccgttgcagatacagcgcgtttccccctcgataatcgcccccacggagagctgcggatggcggtgacgtttataggcctgacggctttgccaggtgctgcgcagctccagccagggcagctgttcgtcgcgccagaaggtttgctgaatatcgcgcgtatggctcacggtgggctccttagctgagggggattgctgtttataccatgccgtttccgctggtggatattaccgtcgtgcctgatgacgaaattgtccagcatcgaagagtcgccttactggagctgatgcaaaaacatattcgtcagcgcgatttgctgggcattgtggaacatctgacggccattttgcttagcggatacgctaatgacaggcagctaaaaacgctgtttaattacctgattcactcgggcaaagcgcttcggttggggaaatttatccgcgaagtggctcagcgtgttccgcagcataaggagaagctcatgactatcgccgaaaggttacgtgaagtggggcgcaggcaggggaagcgggaaggtcgccaggaaggacgacttgagggcgttgaggaggggcagcgcgccgaagcgcagcgtattgctcaaacgatgctcgccgaaggtatggccctggaaacggtgctgagaattaccggtttgtcggaggcggatatccggggtgacactcactaacttattgatattacgctgttatttatgagcgatttatgccgatagcgcgctccgttccatttcgggaaaattccgtatctctctgagtctggacgcatcctcagctatctcgactacccttaatatcctgtgcggtatttatgactgcgttaacagcgataacaaggagacatgcgatatggcttatcagacggtgaatcctgcaaacaatcagcttatcaaagcgtacccggcacacagcgacgcggacgtggaagcggctctgcagaaggcggatgcgctatatcattcgtcgtggtcgaaaggcgatatagcgcagcggctatcggtgctgcacaagctggcggatctgatcgacggccgggttgacgagctggcgaaaatcgccagccaggaaatgggcaaactcattgagcaaagccgcggtgaagtgaagctgtgcgcgcaaattgcccgctactacgccgacaacgccaaacagtttttggcgccggtaaagtatccgtccgagttgggtgaagcctgggttgaacaccatcccatcggcgtactgatggcggtagaaccgtggaacttcccttattatcagcttatgcgcgtgctggcaccgaacctggcggcggggaacccggttatcgccaaacatgccagcatcgtcccacactgcgcggaaaccttcgcccacctggtacgcgaagccggtgcgccggagggggcgtggacaaacctgtttatttctcaggatcaggtggcgaagattatcgccgacgatcgcgtacagggtgcggccctgaccggctcggaaaaagccggtagcgtggtggcggcgcaggcggctaaacacatcaagaaagcgacgcttgaactgggcggcaacgatgtctttgtggtcctggacgacgccgatctggagaaggcggtgaagatcggcgtgcaggcgcggctcaacaacgcaggccaggtgtgcaccgcggcgaagcgctttatcctgcatgaaaaaattgccgacgctttcctcagccagtttacgcaagccttccgcgaggtgaaaattggcgatccgctggacgaaagtaccacgctgggcccgctctcttcaaaagatgcgctggagacgctgaccaggcaggtgaacgacgcggtgaaaaacggcgcgaagctgcacctgggcggcaaacccgcgcagcgggaaggcagctttttcgagcccactatactgaccggcattacccgcgataatccggcctacttcgaagagttcttcggcccggtcgcgcaaatctacgtggtgaaagatgacgatgaggcggtgaagctggccaacgattcgcactatggcctcggcggagccgtattcagccaggatatcgacagggcgaaacgcatggcgtcgcggattgaaaccggtatggtctatatcaactggctaaccgataccgctccggagctgccgtttggcggcgttaagcgctccgggttcggccgcgagctttccgatctcgggattaaagagtttgtgaatcagaagctggtggtcgtgcataaataacggcgtgaagacaaaaacctgccatctggcaggttttttggcgttcactgaacttcaatcttatcccagccgctcttaaacatgcagctgtcgacgagcgtatccctgcgcccctcattggcgtcctcaaccgtatagctggtggaaatatccttcttcttgttctttttgtccgttttttccgagcttgaaccggtgacgacgttatccggggggagatcgatcagcgcctgcgcttcgcactccgtgagctttttattcatctccgtatcgctgactcccggcttcacccatttgtactggacgcagcctgacagcagcacggtgaagctcagaacgcaaagcgcggcgaagcggccgttcatcagaaggtaaccccgccgccgacataggcgccgtcaatcagcgtgtggcccggacggccatctttgccgtcgacgctgacatggcgatagcccactttcagcgtgaccggggtgattggcgtccagcttacgccgccgttggcttcaacgtagtttttgacgctattgttcaggccctccggtgcggcatagccctcaccatagagatggatgctgtcggtcagggccacgttgacgccgccgccgatggggaaggccacgccgttatcgccttttttagggccgaggtagatggctttcgcgccggcattgaacatcaccgggccgagttccaggttataacccgcgcctacgccgcctgtctgggtaccgtcatcggtatttttgagccagttgctttccacatacaggccagaagaggatttccccatttccagattcaggttagtgaagttcttgccctgctcaacggtgccgcccatcgcgagcgcggatcccgagacggcagccaacgccgagagaagaaggatattcagctttttcatgttttatgcctcatcattacattacgcggagggcaccttaacaatcgatttttatgactgcaaatcagcgagtgatggctgttttatgctaattttgttattggatatatttatttgtgttgtttgttagttgtttttactgcggagtcaatgggtaatctttagccgttgagcgtgagttgaatcttttggctaaatattcgctgaacaggcgcgaaaaagcggttgtggacgcaataattggctttctaattatttccaaaaacatttctgttgttacatataagaacagagttttacatttaatccgcgcattccccctccagaagagggggaatgcgacatgactacttgcgcaggctcgcaaatgcggtgcgaatctcatcttccggaagctgtatcccaataaacaccagggtactgtgcggccgctcatcgccccacggccggtcccagtcggcgctgtatagccgttgaacgccctgaaacagcaggcggttgggctcgccgtcgatccacagcatccctttatagcgcatcagctgttcagcgaaggtgagcagcaggttttccatcacccgcgacacgtcgctgatatccaccggataatccagctccaccacgatagacgacacgtcgttctgcttatcggccataaagtggaagcgcggtttgctgctgaccacgttctcttccagcataaagccgctggtgttaaacagcagattcaggtcgatatcgccgtgggtgacgttgtaaatcggcgcgcgggcgttaatacgcatcagccgttcgcggagcttgtcgctgtcgcccgccacgtcagttttggtgagcaggatacgatcggcgtagcccacctgcgactgggcaatggtgaactgattcatctgctggtcggcatgcaccgcgtcaaccagcgcaatcacgccatccagcagatagcgttcacacagcacatcgtgagagaaaaaggtctggataatcgggccggggtcggccatgcctgtgcattcgatcaccagccggtcaaaatcaatttctccgcgatcgcggctgtcgagcagatcgagcagggcgtcttccagttcgttggaacgggtacagcagatgcagccgttggtcagggttttaatctgcgtggcgcgatcgccgataagctggtcatcgacggcgacttcgccaaattcgttttcgataacggcaattttaaagccgtgccgttcgttcaggatatggcgcagcagggtggttttacccgcgccaagaaaaccggtgagcagggtgactgcaatcggtgccatgtttgcctccattagcagcagcgtacgccgcctttgccgtcgccgccgtagcgggcctgctggcgttcgcgaaagaattcatcgtaggtcatgtacggcttgtccggatggttagtctgcatatgctcgacgtaattatcgtaatccggaatgccaatcagcattttcgctgcctgaccgaggtatttttttgcctgacctaagttaccaaacattgtgagtcccagagaacgaataaagccggatggcggctagcgcctcatccggcctacaaacattcgtttgtgtagaccggataagcgtagcgccatccggcattaaggtttagtgatgcgaagaggtcttcacgccgccttccggtaccggcacgtacggggtctctttgtcggtacgcactttattgttgcgcacgttgagccaggttttgatgccgtagaagatgatgctgtagaccaccaccaggaacagaatgctcagacccgcattggtgtagttgttcaccacgatatggttcatgttggcaatctgctgcgcggtcagttcgccgccggcggcgatcttctctttatactgctgcgccatgaagaagaagccttccatctgcgggttggtgctgaacagtttcaggcccagcgcccaggtggtgcacagcagcagccatgcggccgggatcacggtgacccagatatatttggtgcgctgcattttgaccagcaccacggtgccgagcaccagcgctacggcggccagcatctggttagagataccgaacagcggccacaggctcttcacgccgcccagcgggtcgaccacgccctgatacagcaggtagccccacaggccgacgcaacccgcggtaccgataacaccggccaccagcgagtcggttttcttgaggaacggcacgaagttgcccagcagatcctgcagcataaagcggcctgcacgggtaccggcatccagcgcggtgaggataaacagcgcttcaaacagaataccgaagtggtaccagaagcccatatccgccatcgggatgattttgtggaacacgtgagcgatacccacggccagcgtcggcgcgccgcccgcgcggttcagtaccgacggttcgccgatatctttcgcggtttgcaggatttgctcaggtgagatcacgaagccccaggagctgacggtcgccgccgcgtgtgcggtgacatccctcagctgggcggcaatcagcgcggcgttctcaccgcccatttcgtgcaggttcggcatggtgatgcccagacccgccggcggggtgttcatcgcgaagtagaggcccggttcgataattgaggccgctaccagcgccatcaccgccacgaaggactccatcagcatcgcgccgtagccgataaagcgggcgtcggtttcgttagccagcagcttcggcgtggtgccggaggcgatcagggcgtggaagccggagaccgcgccgcaggcgatagtgataaacaggaacgggaacagcgcgcctttccacagcggaccggtaccgtcaatgtactgggttaccgccggcattttcaggtccgggttgaggataacaatgcccagcgccaggccgacgataacgccaattttcaggaaggtcgccaggtagtcgcgcggcgccagaatcagccagaccggcagcagcgccgagataaacgcgtagccaatcagggtaaaggtaatagtggtgtctttaaaggtcagcgccgggccccagtacgggtcgtgggcaatcacgccgccgaagtaaatcgacgctaccagcaggacgataccaatcaccgatacttcgcctacgcggcccgggcgcaggaagcgcatgtagatccccataaacagggcgatcggcacggtcgagcagacggtgaagacgccccacgggctttccgccagcgctttcaccacgattaacgccagcaccgcaaggatgatgatcattatcaggaagcagccaaacagcgcgatggagcccggcaccggacccatctcctgcttgatcatttcccccagcgaggcaccgttacggcgcgaggagataaacagcaccataaagtcctgcaccgcccctgccagcacgacgcccgccagcagccacagggtacccggcaggtaacccatctgtgcggcgagcaccgggcccaccagcggaccggcgccggcaatcgcggcaaagtggtggccgaacagcacgtagcggttggtcgggacatagttcaggccatcgttgttaatcaccgcaggcgtggagcgcgtagggtcgagcttcatgaccttttgcgcaatgtacaggctgtaataacggtaggcgacgaggtagacggaaaccgaggccaccacgatccacagcgcactgacgtgctcgccgcggcgcagagcgacgaccgagaggcaaaatgccccgatgattccaagaatcacccaaggtatgtgcttgaataactttttagtatccatagtaaaacctggcttaataagatgaataatgggccgaagccgtctgggtttagttagggtttgaggaggcattgattagctatgctggggaccatcttgccagaacgtcgcgcgcgtaaagttgggtaaatctgtgagtggttatatccggggttaagcggtcacttgcaggggtaagcggttgggcaggaatcccggtaggcttaaatatgtgattgagatcacagggatattcccgccgtgacgatggggggaagcgaggtaatcccctctcccgcgagagaggggaaggcaaaactacgccacgacgtccatctccatcatcaccggatggaagcggcgcttaaagtagatcagcccgtggccctgctggctcagggtaatgttcctgatttccaccagatagaccaggtggctaccgatggtctgcacctggctaatctcgccctcgaggctcgccagcgcgcctttcagcaccggctggcccagcgcgcctttttgccagccgctgaggccgaaacggtcatccatcgtcatcccggtcatgccagcgaagtggcgggccatctcctcttgctcgtggttcagtacgttgatgcacagcttgccgttgccctggaacaccggattcatcgcgctgttagcgttgatgcagaccattaccgacggcggcgtatcggtcaccgaacagaccgcggtggcggtgataccgcagcggcccgcctcgccttcggtggtgatgacgttaacggcggccgacagactggccatggcatcgcgaaaacgcagacgttgttcatctaattgcattgtgacctcccgctgccggttacttcagcagcttatccagcatgttgatatcggtattgttgtgcagatgcggcaccgtccagccgttctggtcgtactcggacaggcagcgatccaccatcgccatcattttgtccatgttgccggagctctgcgcctgacgcaggcactgcaggcgaatctcatcctggctaccggagtagttgatttcgtacagctcatgacggccgccaaactcgctgccgatggcgtcccacatcagtttgaggatcttgatgcgctcgacgtgatccataccgttcgatccgcgcacgtatttcgccagatattcgttgatctgcggattattgagatcgcgggcgctggacggcagatagatcaggccgctggtgacgttgcgttcaataatgtttttgattttggcgtaggccatcggcgccatcacgcgataggtttgcagcgcggcgtgatccggcagatacgcgccgttaacccacggcgtggcttcggcgcacatcgagtcgctcagcgcccagaacatattgcgccaggccaccacttcgccgagatccgcctgcacgccgcggaactccagggtgccggtacactccagcgagcgcttgagaagggcggtgataaagtcgagcttcacggccagacgcacgcaggcctgcagcggatacatgcgggcgaaaccgccctccatcgtccagcggcggcagcgatcgaagtcgcgatagatcagcacgttttcccatgggatcagcacattatccatcaccaggatcgcatcgttctcgtcgaagcggctggagagcggataatcgtagggcgatccggttgctccggcgaccagctcataggaggcgcgggagataagcttgaccccttcggcgtccatcggcgcgacgaacatcagcgcgaagtccgggttttcgcccatcacctgcgccgagccgaagccaatcatgttgtagtgggtgagcgccgagttggtggctaccactttcgcgccgctgacgatgatcccggcatcggtctctttttccagcttgatatagacgtctttcacttcgtcggctggcttatggcggtcgatgggcgggttgacgatggcgtggttaaagtagaggccggtttcctggatgcgggtgtaccagttacgggcgttctgttcaaactgaccataaaacgccgggtttgcgcctagcgcgcagccgaacgcggctttgtagtccggggtacggcccatccagccgtagctcaggcgcgaccattcggcgatagcgtcgcgctgctggcgcagatcgtcggcgcttttcgcgacgcggaagaacttgtgggtatagccgccgctgccggtatcggtgccccagcacagggtatcctgcagctcgggtttatgcagcgcgtcgtacatctgggcgacggaggcggcggcgttgcggaacgccgggtgggtggtcacgtccttaacgcgttcgccgtagatatagatttcgcggccgtcctgcaggctcttcaggtactcttcaccggttaacgggcgtttagcgtcggcacggaaattttcaggtttcataggtgacctcttcagtattaatcggaatgcgatgttaaatttatgttttgtttttgttgttcaattgaagcggttaacgcggctttcgtgaagagacttttaggtcaacggtcggtacttttcaggcggggttgggttatgtgatcgggggttggtttttctattttccggcctggctccccgatgatccgacgacaagccagggtgggttttgaatttgtaggccggacagatgcgcagcatcgcctccgggaaatgcagcgactctgcgctctgctcccgggggcggcgcctgacgcgctttgcccgggctaccgcctctcagacggctgcgaactcgccgcgccgtccccggtaagatcttatgataccggtactttttgcgttctgaacgcgctcggcgagcagccgactaagcggttaaaaaagcgggcaaaataggccggatccttaaagcccagctgccaggctatctcgttgaccgcgctgtcggaaaagagcagtagcctcttggcttcgcgcagctgcctgtcgaaaatcagccgtttgggcggccggttggcgaagcggcggcagatatcggttaaccgggattcggtcagatgcagctcgctggcgtaatccggcaccgtccagtgctgatggtagtggccgtcgatcagctggttaaaccgctggaacagcttgagctcgccgcgtatcccgctggccgcgtgatcgtcaagcttcgcgttgcgcagcaacagggtgaacaccgcctgcgccagcagcgtcagggtatgttcccgccccggcagctgcgacgtcgattcccgttcaatcagccgccagtagtgcgccagcgccgccagctcctcgggcctgtcggccagcgacaggcagatgcccggcagaccgaaagcctcccgcgtgccgggatagagcacctccagcagcggccagaccagatcctcgcgcaccgtcagcacgtgaccgtcgctatcggactcggtgataaaagcgtgcggcaccgagggcggcgtcaggacaaacagcggcgcctgcaccgaatagcgatgatcgtcgagctgcagctcaatctgcccggtatcgagaaagtgcatctgaaaatactggtcgtgacggtgcgcctgcatatcgcggccaaagaactccgccatcctggcaaacgattgataatgcacatcttccgtccccaggctctcatcgtactctttattaatatcgatattggctatcgggctctggcacatggcggctccttacggcgtcgcgcgcggacgcgttcctttcatcggaatcacccagataatcatcgcgccgatgaccagcagggcggcgacgaaccacaggccgctgctgaagctgccggtaatatccttcagccagccgatcataaaggggctgagcgccgatccgatattacccgtcgcgttgatcaccgcgataccgatcgctctggcgcgcaggctgatcgactgatccggcgtggtccagaaaatggccattgcgctaaacgatccggtggaggccatcacgatcccgagcagctggatcaggttgtgatcggtggccgacgccagcagccagcccgcggcggcgaacaggaacggcagggcggtgtggtgcttacgctcctgatgtttatcggagtggcggctccagtagatcatccccagaatggtacaaatctgcgggatcgccgccagcaggccgatggtgatattgctgctgctttcgttaaagcttttgaggatctgcggcgtccagatgctgatcgcgctgagcgtattggtcaggcagaagtaggccagggtgtacatcagcacgatcggcgtgaacacttcccgccacaggctgcgctgctgcatggcgtgatggctgatcgccccttccggctggaccagcgtcaggcggtcgttatccatcatctcctgcaggcattttttatcgtccgcggtcagccatttcgccttcgacggcgaatcatccagccagaaccagaccataataccgagcagcaccgacgggaagccttccagcaggaacagccactgccagccgtgcaggttcagcaggccgtccatcgacaggatatagccggagacgatcgaccccagcgcggtggtcaccggcatcgcgatcataaacagcgcgttggcgcgggcgcggaaaaaggccgggaaccagtaggtcagatagagcagaatgccgggcagaaaaccggcctcggtgatgcccaccagcatgcgcaggatatagaggctgttcggcccggtcgcgaacatggtggcggtggaggcgatgccccacagcaccatgatggtggcgatccagcggcgagcgccaacgatgctgagcatcacgttgctgggaatgccgaatatcacgtaggtggcgtaaaacagggtggtggcaagaccgaacatggtggcgttaaggcccagatcctgccccatggtcagcccggcaaagccgatattgatgcgatctaaaaatgaaaagataaacagcacaaacaaaaagacgatcaggcggcgaaagagcttgttgataaccgactgctgctgcgccgtcagctgcttgtgctgattagccggatcgaacttttccgggatggcagatgatgtatcgctcattatcattttcctctaatgggaattttgtagggtactgcgggtattaatagacgcctgacgaaccctgggcggttttttccgcgccaaatcgcgccgccagcgcttccgcgccgcgggccagcagggtggtatcgacgccgacggcgacaaacagcgcgccgagttccaggtagcgcttcgccagcggctcgctggccatcaggatccccggcgctttgcccgccgcgcgaatttgcccgatggcgcgctcaatggcggcctgcacttccggatgctgcgggttgccgctgaagcccatatcggcgctcagatccgccgggccaataaacacgccgtccacgccctcgacatcgaggatctgcggcagattgttgagcgcttcgcgggtttcgatctgcaccagcacgcacatcgcgtcgttggcctgatggagataatccgggacgcggttccagcgcgaggcgcgggccagcgcgctgccgacgccgcgaatgcccgcgggcgggtagcgggtggctttcaccgccagccgcgcttcgtcggcgttctgcaccatcggcaccagcagggtttgcgcgccgatatccagcagctgtttaatctgcaccgggtcgttccacgacggccgcaccaccggctggctggggtagggagcgatcgcctgtagctgggtcaggattgtctgcacgctgtttggcgcatgctcgccgtcgatcagcagccagtcgaacccggccccggccagcagctcggcgctgtagctgctggtcagccccagccacaggccaatctgcggacgacccgcttttaaggcgtctttaaaggcgttatgcatcatgtttctcctagacaaagcggcagctaatcgcgcccatgttgccgtagtcgacgtggaaggtgtcgcccttgcgcgccggtaccggacgggtaaaggaaccgccgagaataatctgcccggcttccagctggacgtcgtacggcgccagcttgttcgccagccaggccacgccgttggccgggtgattcagcacccccgcggcgacgccggtctcttcaatcacgccgttgcgatagagcagggcggcgatccagcgcagatccagctcgtcgggtttaatcgggcggccgccgaggatcaccccggcgttggcggcgttatcggagatggtgtcgaagactttgcgcgggcgctgggtttccgggtcgatgttgtggcagcgggcgtcaatcagctccagcgccgggatcacgtagtcggtggcgttgtagacgtcgaacagggtgcagtgggggccgcgcagcggtttggccagcacgaaggccagctccacttcgatacgcgggacgataaagcggtcggtaggaatatcgccgccgtcgtggaaaaacatatcgtccagcagcgcgccgtaatccggttcgctgatttgcgaactggcctgcattgcttttgaggtcaggccgattttatgtcctttcagcacgcggccttcggcgattttcatatttacccattcgcgctgtaccgcgtaggcgtcttcgatagtgatcgtcgggtgatccagcgaaatagcgcggatctgttcacgctgtttttccgcctggtttagccgctgggcgatcagggtatgggtatgtttatcgagcatagttgcttcctgttacgtcattcggtgctgctgcgccggaaataaaagccggcgtcgtttcgccctctcccggcgggagagggcctgaccggccgcacgctatttaaacaaggcgtgcacgttgttctgcttgtagttcagcgtcgggtgcagttcatcaatctcaaacgacagcgccagatagcggctctccatcagcgcggcgaaatgggctttgatcagcgtgaacagcatatcgcccacgtcctggcggctctcctggctgcgtccggcgccaattttcagcgtcatatgcacaaaggcgtaatcgtgctggccgtcggccatctgccaggtatccagccagatggcgcggctgcgaatgccgccgatggggaagatgccggtggccgccagcgcggcgttcactttgccgaacaggcccggtaaatcagcctgttcgcggatgttgtcggtacattcagcgataaaatgcggcattctgcgtgctccttacgccgtttccggcagagggaagacggcgttgacctggcctgtgccggagctggcgaacagctcggtaataaactctactttgccgtcgtatttgtcccagcccagcaggcccagaagcatcaccgtgtcgtgcatattgccttcgccgaagcagtagtcggcgtactccggcagcatggtgcagaactctttgaatttgccttcgcgccacagcttcacgacccgttcgtccatctggtgatcgaactcgcgggtatagctgttcatcccctcttcggcgcgctggtcgtcgataaaacggtgcgacagcgagccgctggcaaagaccgccacggtgccgtcatatttctcgatagccttaagaatggcttcgcccagcctgcggctgtcggcaaaatcatgaacggtacagaacgccgagatagagaccactttgaaatgcttatcgctgttcatgtagcgcatcggcaccagggtgccgtactccagcttcaggcttggaatgttatgcgctttggcgcggaccccgagcttgaccgcttcgtcggcgatcaggtggccgagcgccggattaccgtcgtagtcgtaggtcatgtcgcgaataaaatgcggcagctcgttgctggtgtagacgccctggaaatggtcggcacagttgatgtggtaggcgctgttaaccagccagtgggtatcaaagacgatgatggtatccacgcccagctcgcggcaccgcttgccgatttctttatgcccatcgatggctccctggcggcagccgtggtttttacccggcagttcagaaagatacatcgacggtacgtgagtaatttttgctgctaacgctaactttcccatatcagactccccattttgggatcggatggtcgcccatcgagatgcagacgtttttcatttcagcgaacacttcaaagctgtattcgccgccttcgcggccggtaccggaggccttcacgccgccgaacggctgacgcaggtcgcggacgttctgggtgttgacgaacaccattccggcttcgatgccgcgcgccaggcgcagcactttgctgacgtcctgggtccagatataagaggcgaggccgtactccacgtcgttggccaggcgcagaccttccgcctcgtctttaaacggcagcagacaggctaccgggccaaaaatctcttcctgcgccacgcgcatgcggttatcgacgtccgccagcaccgttggccgcaggaagttgccgtttctcagatgggcgggcagatcggcgggcttatccgcgccgccggccagcagggtcgctccttcttcaatgccgaggcggatatagccggagactttctcccagtgctgctggctaatcagcgcgcccacctgggtattcgggtcggtggggtcgccgacgcgcaggcggttagcccgctcggcgaagcgtttaatgaactcggggtagatgctctgctgaatgaagatgcgcgagccggcggtgcagcgttcgccgttgatcgagaaaatggtgaacagcgcggcgtcgagggcgcgctcaatatcggcgtcttcgaaaatcagcaccggcgatttgccgcccagctccatggagtactttttcagcccggcgtttttcatgatgttgcgcccggtggcggtaccgccggtgaacgagaccgcgcgtacgtcatggtggcggaccagagcatcgcccgccgtcgcgccgtagccctgaaccacgttcagcacccccggcggaatacccgcttccagcgccagctcgccaagacggtcggcggttagcggcgatagctcggacatcttcagcaccgcggtattgcccagcgcgaggcacggcgccaccttccaggtggcggtcataaatggcacgttccacggcgacaccagcgcgcagacgcccaccggctgcacgagggtgtagttgagcatcttgtcgtcaaccgggtaggtcttgccgttcatctgctggcacacttcggcgaagaattcgaagttgtgcgaggcgcgcgggatcagcacgtttttagtctggtggatcggcaggccggtatcggcggtctccatggcggcgatctccgggacgttctggtcgatcagatcccccagcctgcgcatcagacgcgcgcgctctttcatcggcagattggcccatttcgggaacgcctctttcgccgccgccaccgcctgattcacctcgtcggcgccgccggaggcgacttccgccagcacttcgccggtggccgggttagtggtatggaaatattccgcggcggcgacgtttttgccgttgatccagtggttaatttttttcatgacagcttctcctcatatgcctgctggctaatgatgtggttgaccaggcggccgacgccttccacttcgacgatcacttcatcgcccggcaccacgtccgacagccccttcggcgtgccggtggcgatcatgtcgcccggctgcagggtcataaattcgctgaggtaagcgatcaggaacggaatgctgaagatcagatcggcggtggtgccctgctggcgcagttcgccgttgacccaggtgcgcagcgacaggttatgcggatccgggatcgcctctttgctgacgatccacgggcctatcggcgtcagggtgtcgcggcttttgacccgcaggttgggacgatagtagttttccaggtagtcgcggatggcgtagtcgttgcagacggtgtacccggccacgtacgccatggcgtcggcttcggcgaccttacgcgcggttttgccgatcaccaccaccagttcagcctcgtagtgcatgtactcgacgttatccgggcgcaccgactcttgcctatggccgataaaggtgttgggcgctttgataaacaccagcggttcggttggcggcgtaaacgccagctcgctggcgtgatcggcgtagttcaggcccagcgcgaacagggtgccgtcggcgggcggcagccagcgaaactcgccttcctgaagtaacctgccgttggcgagctggacctgcccgcgttcatcaacctggacatcgtgccgctgtccctgccactcaatacgtgcttgcctcatgccagctctccttcatcaatcaccgggttttccagcgccgggaagccctcggcgagaatgcgtacgcgatcgccggggcgcagcgtaacgcgggagtggggcgtaccgatcagaatcgcatcgccgggattgagggtggcgaattcgctcagggcgctcagcagctcggcggcggagcgctggagatcggcggtattccagctgtccgcctcgcgaccgttgatttcggtgatgatggtcaggttatcgacgttgctgagcggcgcgagcgcgccaagcgggcagaagccgtcgcggcatttggctttgatggccggacgatagaagctctcttccggcaggctgacgtcgttcgccagcgcgtagccggcgatataagccgcggcgtcttccgcggcgattttgcgtgcggttttaccgacgattagcgccacggtggcgccgctctgcacggtttcgccttgcggatagggaatgctttcgccgtcgccgataacggtgttgcgcggtttgataaaccagaccgcggtcttcggcggggttttatacggggcctgctggaacgcttcgcgccaggcgtcgagctggctgcggtggttaagcgccacggcgaagatggtgcctttcattgaccactcctctgctacggaattaggaagttagttaattcattaatatgttaatgatcatcttttatgctttgcggaaaggtttggcaaacagaagtgaatgttttgtgatctgattaacaataaatttacagttatgttttttatttgttgttaatcaattagataattaattttattgtaccttctggtacttttcagaggcagaaaccggttgccttcagaaggaattagcgctaattattaacttattaacagattggggatttatttcagaggtatgtgatgcatgattcgttaactatcgcgctgctgcaggcgcgggaagcggcgatggcccactttcggcccatcgttaaacgccacaatctgaccgagcagcagtggcgtatcgtgcgtatcctcgccgaaaatccgtcgatggattttcacgatctggcctttcgcgcctgtattttacgtccgagcctgaccggtattctgacccgcatggaacgcgacggcctggtgctgcgtttaaagccggttaacgatcagcgcaagctgtacgtttcgctgacgcctgcgggcctgaagctgtatgaaagcgcccaggcccaggtggaagaggcctatcgccagatagaagcccaatttaccgtcgaaaaaatgcgtcagcttaccgcgctgctggaggagtttatcgccctggggaatggggtgggtggagaggaagaggcgtaattttccttccgtgaagctagaaatatttccccggtcgcgctgtgcttaccggggctacgggccggtgctatcccgtagcccggataaggcgccagccgccatccggggaattcccggccggtcagaacagggtatcgagctcttccagcacgttatactgctcgtccaccagcagcagggttttccatttatcaaacgtcaggcacggatgcgaggtgccgaacaccagaatatcgccgacctgcacgtcgctgcccggcgcgaggcgcagcatacagtgctgatccataatccccacgctctcgatccccgccgcagacagctgcgcgccgttgcgatagcgagcgatcggctgcggcagtccggcgtcgaaggcgcagtcgcgtttgccgaagttgaccaccgcgcgatccgcttccggcaccgactggaccatcgccatcagctccagcgccgaggttaaatcaccgcccagatcgcaggcgatcggatcgcgcgccgccagcgctttctgcgcgatatcgtagatcccccgatcgtgggtgatatagcagccggggcggataacgatccggcaccgcgccggtttcttcgccgccagccagatattgcacaccacgtcataccagacggtaccggcgccggtcagcacaaactccccctcaaccagatgcgccatccggcaggccaaatcggcggcctggtgcagcagagcttccacctgcggctgcggatcgtcgccgtgcaacaccccttcatacagctcaagtccgcgcagcttaaggccaggaaggtccgcgacggcctccgccagggcctgcgcatcctcaacgctgcggcagccgcagcgcccgccggccacgcccagttcaatcagcacgtccagcgtttgccgccgttcgctgaaaaaggccgacagcgcgcgggcgttggcgaggctatcgatgcagcagataaactccgccgcccggtaatgcgccttcaggcgcgataccgcctgcatattcgccctgccgaccagctgattgaccatcagaacgcgctcaacgccgctggccatcgccgcgctggcctgccaggcgctgcccacgccgattccccatgcgcccgcccgctgctgggcctgaaaaatccacggcgtcatcgttgttttaccgtgcggcgccagcgagacgccgcgcgcgtcggcgtagcgctgcatccaggcgatgttattttccagcgccgtttttttcagcagcgcggcggggaggcagacctcctccgccagcagatttgccggagcggccatcacggcggctttgtgcggaataagcgtatcggagtggtatttcataacactatccttttagggtttatgctcggaataaagctgagtatcaattttaattaattgaaaaatataaatttaatatgtgatttttattgtttgtgaataaaagtatcacaatttgatctggtttttgcgtagttttccactgtttttccgccttgtaaatggttaacttgtcgatagagttgaaagggagtcattgcgatgaaagttaactggcttttcaaaaacgtcacggtcattgacggcagcggcggaccgcagtttcgcggcgacgtggcggtgaagggcgatcggattgtagatatggccccggcgctgaacctgccggcggagcaggtgattgacgggcaggggcgcgtgctggcgcccgggtttatcgatgtgcatacccatgacgacatcaacgtcattcgtatgccggcctatttgcccaagctgagtcagggggtgacgacggtgattgtcggcaactgcgggatcagcgcggcgacggcgaccctgcgcgacggcgtgcctgacccgatgaacctgctgggcgagcaggagcactttgtttaccccaccgttgacgcttacgcccaggcggtggaggcggcgaagccgtcattgaacgtcggcacgctgattggccataccgcgctgcgtaataaccatatggacgatctgttccgcccggcgacggaaaccgagattgccggaatgcgggtgcagctgcgcgacgcgctgcgtcagggcgcgctggggctgagcagcgggctggcctacgccagcgcgtttcagtccaccactgaagaagtgatggcgctggccgaggagctggcggcggaggggggaatttataccacccacctgcgttcggagttcgaaccgattctggatgcgctcgacgaggcgttccgcattggccgccacggtaacgtaccggtggtggtatcgcaccataagtgcgccggcgcgaaaaactggggtcgcacgaaggagacgctggctttcttcgatgagatgcgccagcgccaggagatcgcctgcgactgctacccctattctgccagctcgtcgacgctggatatgaagcaggtcaccgatgagttcgatatcgtcattacctggtcggaagcgcagcccgagcaggccggaaaaaccctgcggcagattgccgacggctggcaggttagcctgcacgaggcggcggcgcggctgatgcccgcaggcgccatctactacaacatggacgagcaggacgtgcggcgggtgctgcgttacccggtgaccatgatcggctccgacggtctgccgaacgacccgatgccgcatccgcggctgtggggcgcgttcccgcgggtcctgggccactacagccgcgatgaacggctgtttccgctgaccaccgctatccacaaaatgaccgggctgtcggcggcgcgtttccagctggcggatcgtgggttggtgaaagtgggctactttgccgatctggtgctgttcgatccgctgacggtgcgcgatgtcgccagcttctccgacccgaaacaaccggcggaggggatcgaggcggtgatggtcaacggcgtgatgagctacggcagcgacaaaaagattatcgggcgcgcggggcgtttcctgcgccgccaaatgaactaaggagtgcaaaatgagtattaaacgttatggcgtagaaggtggtaccgggaccggtgggcagcatctgccgttcgcgcgcgcggtggaggcggggggctggctgtacgtttccggccagacgccgatgaaggacggtgaagtggtggaaggcgggattgtcgaccaggcgcgtctggcgattcagaactgcgtggatatcatgaccgaagcgggctacaccctggccgacgtggtgcacgtcaaggtgattctcaccgatgcgcgctatttccagtctttcaataaagtgttccgcgagttctttggcgacaacccgcctgcccgtatctgctgcgtcgcggacctggtggtggattgtaaagtcgaagtagatgtgacctgttataacgcggctcgcgtataaaaatttattaaccagaaatataaacaggatttttgagcgctgaattcattcagcgcttcgtagccttttaccttttacatactcaactggcaggatgtgaataatgaatagtcatatctttttagtcggctttattatttacgcgctggccatgatttggcttggctggtacgtgtcgcgtaatcaaaaaagcggtgaagattttttactcggcggccgttccttaccgctgttcctgacgctgggctccaccgtggcgaccatggtggggaccggttcaagcatgggcgccgtaggcttcggctacagcaacggctgggccggaatgctctacggcgtgggcggggccatcggtattttgctggtcgcctggctgttcgccccggtgcgtaaactgcgctttatgaccatgagcgaagagctctcttattatactggcggcagccatttaattaaaaatatcgtcggcataatgatatttgtggcctctattggctggctgggggcgcatattcttggcggcagcatgtatttatcctgggcgacggggataaatctgacgctagcgaaaattattatcgctctggcctttgcgatttacgtcatcatcggcggttattctgcggtggtatggacggataccattcaggcattaattctctttttcggctttatcctgatggcgattctggcggtggttcacgtcggcggatgggatgccatcgtacaggcgatggatcccagggcgatgagcctgttcgcggtcgataagctgggcgtcattccggcgctatcgctggcgatggtcatcggcgtcggcgtgctggcgaccccttcctatcgccagcgtatttattcggggaaagatgtctcttcggtgcgccgctcgtttgtctataccggcgtgctgtatctgtttttctcggtgctgccggcgattatcggcatggcggcatggacaatgaacccccatcttgagaacagcaactacgccttcctgttcgccaccagcttcctgccggcgatactgggtctggtggtgctgattgccgggctttccgccactatgtcttcggccagctccgatgcgatagccgccgtggccatcatgatgcgcgatgtctacacccttgttaccggaaaaatgccgccggcgcataaggcgataacgctctcccgctggatgctggcgttcgttatcggcctggcgatgatcttcgccctgacctcgaacgatatcatcagctatatcaccaaaatgatctccatgctgatgtccgggctgttcgtctgttcaattctgggccgcttctggctgcgctttaactggcagggcgcgctcaccgcgctgctgagcggcatgctggtgtcgattgtggttctggttaaggcagactggctggcttactgggggaacccgtgcattccgtcggtcgtcggcagcttcgtttccgccatttttgtcaccgtcatgacgccagccagcaaaatcagccgtcagcaggcgctggaaatgattacgcaagagcgggaagggcaggcgattccggcgaagacggcggtgcaggcctcgggagaagcaccatgaaggactatattgccgtcgactggggctctacccagctgcgcggctggctgattcgcaacggccagtgcatcgggacgaagcagctgccgctgggcatcacccgcctgaacggacgatcgcccgccgacgtattcgcggagcatgtggccccctggcgcggcgccgaaatgctgccggtgctgatggccgggatgatcggcagcgatgcgggctggcaagcggtgccgtatctggcctgtccggcggcgatcgacgcgccggggcagcagcgatgcgccgttgctgaaggcgtgtggattattcccgggctcaagattgcccaggacggggagttcaacgtgatgcgcggcgaagagacgcagctgctgggggctatagagctggcgccggcggagtgctacgtgctgccgggcacccactgcaaatgggtacaagtgacggacggcatggtgcgtcattttgccacggcgatgaccggcgaactgcatcatctgctgatgacgcaatcgctgatcggcaaagggctgccggcccagcaggcggacgaggcggcctttgaacaggggctggaaaaagggttggcgcagccgtcgctgattagcgaactgtttgtcgccagagctgcccgggtgctcggggcgctggcggcaacctcggtcagcgactatctctccgggctgctgattggcgcggaggtggcgaccctcgggcagcgttaccgtacctctggcgtcacgctggttggcgacccggcgctgaatgcccgctacagtcgggcgatgaaggcgcgcggaatgacggttaacagctgcagcggcgatgaggcgctgctgagcggcatggcgaggataatgcatggacaagattaaactggtggcgattttacgcggtattcgccccgctgaggcggcggagcatattgagacgctgataaaggcaggatttcgctatatcgaaattccgctcaactcaccggactggcagcagagcattccgcagatggccgcgcgctttggcgagcaggcggtgattggcgcgggaacggtgcttaaggtggagcaggtcgattttctggccgatgccggggcgaagcttatcgtgacgccgaatactcagccggcgaccatccgccgggcggtggcgcgcggaatgcgggtctgcgcaggatgcgctaccgcgaccgaggcgtttagcgcgctggacgccggggcgcagtggctgaagattttcccgtcttccaccttcggcccggactatattcgggcgctgaaagcggtgctgccgccggaggtgccggtgctggcggtcggcggcgtgacgccggagaatctggcgagctgggtcgaggcgggatgcgccggcgccggtctgggaagcgatctgtatcgcgccgggcaggccgtggagcgtacccgtcagcaggcggagaggtttatcgccgccgcccgctgcggttaatcgcccagcggctgcctgtcgacgccgccgcgatggctgtcgagcgccagcttaatccggcgcagcctgccctttgcctgggttttgttggccatcgccagttcggtggccagcacgtcaaccatcgccagcatcgcatagcgtgaagtgctgggcttgaagatatagtcgttttcgcgcaccagcagcggcagcaccagatccgcctgctccgccagcggcgttccggcgggagtgatggcaatgacctttgcgccgtactgcctggcaatcgccgcgctctcaataatttcctgggtatagccgcccagcgacagcacgataaccacatcctttggcgtcaccgccgagctcatcatgcgcaccagcaggccgtcgttctggctgaccaccggcaggccgaggcgaaacagacggtactggatctcctgggcgcagatggtggagccgccgcccatcccgagggccaggatctgccgcgcgtcgctcagccagctcaccgcgcgcttcagcgcctcaatatccagcgcccggcggttggtctccagcacgccgatgatcgactcgtagatcccctgcacgccctcaaggtccggcacatcgaggataaatcgctgcccgaccgccagggattgcgcgagcttcatcttcagctcgcggacgtctttgcagccgagcgcccgggcaaagcgggtgaccgaggcctggctggtgtgggtcaggcgcgccatctccgcgatgggcagctccgccgccgccgcgacatcatcgagaataaactgcgcgatgcgtttttcggtcgccgtgagttccacaaagcgatcggtaatgcaggaaatgatatcgattgaccaggacatacgggtatcaacgggtaagttttgaatggtactttgtaccatattccgccgctgaaatcagcgccggaggctacagcgctaagcgcatggcgcagcgcgtttccggcggcaggccgtgttccgtttccagctcccttttcgccgccagtcccgccggtagccttagctcgcttaacattgaaaaccccaggcgcgtgtaaaacggcgcgttccacggcacgtcgcggaaggtggtgagcgtgaccgccggatacgccgcctggcgggctgtctctataacctgctccagcatcatgcggccaacgcctcgcccctgccacgcctgatgaacggcgatctccacgataaacagcgcatcgtccagcggttcgctcagcaggaagcctatcggttggtcatcggtcacggccagcaggctgtggtcagtttcaagaaacagccggtggcgctcggggcttatcacttcgctttccgccagccaggccagcgccgggatctggcgaaaagcctgggccgccgagcgctcaatggcgggcagaagagggatgtctcgctcctcagtcaggcgtaacgtcgcggcggcggttatagtgttagttttcatcacctcagcatagcagcctccgggagaaatgtatggagcttaccgccgtttccgccacccagttcagcgtcgcgcagctgacgacgatcctttgcgactgtttcgaagattacctggttcccgtcacgctgtcggtagaggtttttgtccagcgttttagcgccgaagggctgagcctgctggattcctgcgtctggctggatggagatgtccccgcggcgatggcggtcgtcgcccgccgcggcgatgaagccaggctggcggcgttcgcggtgcggcctgcgtatcgcggaaagggcgttggccgccggctgatgtcgccgcttatcgacgcgctgcgcgagcagggcgtacggcggatgtggctggaggttatccgcgacaaccacgccgcggtggcgctgtatcaatcgctgggcttcgaggtgcggcacgggctgtgcggctatttaagcgcgcaggccggaagtgacgggccctccgtattagaggatgttgacgtgctggcgctgacgcgcagggcaggcgccgagattaacggccagctgccgtggctgatggacccgctcaccttcagcaccctgccgtgccgggcgctgagcctccatcagcaggctttcgccgtgctggcgaccttatccagcaggccgcagctgcagtttttatgggtcgatcccgccgcccgcgggcgcgggcgggggcgggaaatgctgatggcgctcgcccaacgctttccggggctcgggacctcggtgaccatcccggagcgctttacgccgctgtttcacgccgccggctatacgcccatggcattaaaacagtatgaaatgagcgcaacgttgagcgccccgccgccagcagggcgttgagattcagccgttacgcgggtcgctaatcggctgacgaaccaggaaaatataggccagcgcgccgagggcggtcacgcagccgcagataatcagcgccagctggaatgagtgggtggtatcgacgataaacccggtcaccaccggcgcgaaggaggcgcagataaagctggcgaagttctggatgctgccgacggatgcggtcattctcgaggctaccgcgacgtgaatcaacccccagcaggaggtgccggcaaagtggatgcagaacagcgccataccgattaacagcaccgcggcgatagaggtagtggcctgcggcacaattaacgtaaacgcggcggagcagaacatcccggcaataatgcaaattttacggcttttgatcggcgccatgccgcctttaaccagccagtcggtgacgtagccgttgataagcataccggcggcgccgaacaggaaaggaatggcggccataaaaccggtacttttcagatcgaggctatacgccgtttgcaggtagcccggcagccaggccagatacagccacgcggtatagttgatgccgctgaaacccagcatcattccccacatggttttgtttttaaacaggctgcgccattcggcaaagctcagcgggtcgcggcgaacgttgacgcttccggcgttaaggtaggcctgctcgtcggcggtgagagagatatcttcccggttgcgatagagcatataccagccgatagcgacgaagatccccagcacgccgatggtgataaacatcccgcgccagcccatcatcagcatcatggcggcaaggatcggcgggctgatcgcgacgccaatcgtcgaggcggcgttaaagaaacccatcgggcggccgcgctctttgatattaaaccagtcgttgatcaccttgacgccgcaggggttcatcggcgcttcgccgatccccatgccgatacgcaccagcacgaactgggtaaagctgtgcaccatccccgagaccgcctgaaacagcgaccagaaaaacatccccagccccagcatgatgcgcggacctttacggtccagcagcggcccgcaggggagctgggcgatgccgtaggccagcgagaaaacggacagcagcgccccgatttcggtggcgctgagccccaaatcctcgcgaatcgttaagttcgcgacggacaatgaacttctgtcgaggtaattaatcaccgccgccagaaataacaggatcattgccgttgtctgaatttttttaatgcgagtactacgcgttaacgtattatctaacggaacagtcatcgtctccgcctttcctttatcaaaggttgtctgcgggtcgatagtgatatttcgtgattccacgcctgactcctggttattctatttgaacgacaagtgacatcgaatggtttaaaccccacccacctatttcacagtaaagtaagtcgacttgttttcagcataaataaccttttttctggcgctggtttatgttttgagatctgtgctgctgattatcattttctgtttttaatcggtacttaataagcctgggattcgctctgcctgagcgagttaatcattgattgcttcgccgagttcaggtggttacgcagcgccaggttggcgtccagatcgctgcggcagataagcgcgctcaggatagtcatatgttcatcaatggcgatgatattgcgctgtttaaggtcgctctcatcccactgatagtgaaagtgaaaaattacggaaataatctcaagtgattgattaaaaaatatattctcagccgcggacaggagcagagaatgaaagtcgcgatcgagctgggaaaacatacgaaagctgtcgccgatgctgtcacgcagggcgcgatggcgctcaagcagggttttcgcctgcagccagcgggcgtcgttgtccgggaggttgaggaagtgctgtagcgcgtgggtttccagcatttcccgcagttcgaacagctgctcggcccaggattgttcaaacttcttcatattccactggccgcgcttttcgctttcaatcaggttgtagcggctgaatttcaacaaaaactccctgaccacgaccgggctgacgccggcagcacgcgccagctgtagctcggaaaatatctctccggcgcgcagctggcgctggttaatcatggtgtaaaacgcctgctcgaagagacggttctgttcggccagcgaggcgctggagccatcgaagccgtcctgcatctccggctggcgaaggatctggtagtcctgaccgcgctggcgcagcacgccgcgctcgcacaggtggctgaggatatggcgcacggtggtgcggctgatgttgtacatctccgccagcgcgctttgtgagggcagcggcgacggaagaaagccgcgtgccatatcgtttatgacctggttaatgacgttgtgacgaaggttttgcgagcggctcattatgcatctccatttttttagctattaaagccggatttaaaacagttttgtgcgcgagatttcacaatttttgcaatgaatttattctcacctctgtttttcatcgatatctaaaccaacaaatacggaggaaattattatgacgtcgatgaatacattagtgtgtcaggaacccaaaatattgcgctgggaaaaacgccagattcccattcccggtgatgatgaagtgcttattaaaataaaaacggtggggatttgtggtacggatattcatgcctggggagggcatcaacctttttttagctatccgcgcgtgctcggtcatgaaatatgcggtgagattatcggtctgggtaaaaatattcttaatctgaaaagcggacagcaggttgccgtcataccctacgtcgcctgcggtcagtgtccggcctgcctgagcggccggacaaactgctgcgagaaaatttccgtgatcggcgtacatcgggacggcgggtttagcgagtacctctgcgtgccggtaaaaaatctgctggtggtggatgacgtcgagccggaagccgcggcgctgattgagccttttgccatcagcgcccacgcggtgcgccgcgccgctatccagccgggagagcaggtgctggtggtcggcgcgggccccattggtctcggggcggcggcgatcgccaaagccgacggggcgcaggtggtggtggcggataccagcccggcgcggcgcgaccacgtggcgcagcaccttggtctggccacgctcgacccttccgacccgcagttcaccgaacggctgtgtgccgcgtttggtggttcgctggcgcagaaggtgatcgacgccacggggaatcagcaggcgatgaacaatacggtgaatttaatccgccacggcggcagcatcatctttgttggcctgtttaaaggtgagctgcagatcccggacccggagtttcataagaaagagacgaccatgatgggcagccgtaatgcgacggaagaggattttgccaaagtcgggcggctgatggccgaggggaaagtgaccgccgggatgatgctgacccaccgctacgatttcaggtcgctggctgagatttacgaaaacgacgtgattaacaatcgccagcttatcaaaggcgtcattcatttttagcaggaaaggctatgaaatcgttaaacagaaaagattttcccgggccgcggtacccgacgcgcgtgattcagttcggcgaaggcaacttcctgcgggcgtttatcgactggcagctggacctgctgaatgagcaaaccgatctggcggcaggcgtgaccatcattcgcccgatcaacaccgagtttccgccgtcgcttaatatccaggacggactctacaccacggcgatccgcgggctggacgaacgcggcgaggcggtgagcgaggcgcggattattcgatcggtgaataacgagatcaacccgtggcaggattttgccggctatctggcgctggctcgtaatccggcgatcgcgttcgtattttcaaataccaccgaagcgggcatcagctatcacgccggagaccggcctgacgctaagccgccggtcagctttccggcgaagctgacccagctgctgttcgaacggttccgccatttcaacggcgcagcggataagggatggacgatgattccgtgtgagctgatcgactacaacggcgaagcgctgaaggcgctggtgctgcgctatgccgaagagtggcaattgcccgcggcttttcgcgactgggttgagaccgccaatacgttttgttcaacgctggttgatcgcatcgtcaccggctacccgcgcgaggaagcggaaaagctcgaagcggagctgggctaccatgatgctttcctggataccgccgaatacttctggctgttcgttatccaggggccgcaggcgctggcgaagacgctgcggctcgaacgttacccgctcaatatccgtctcgtagaggatatccggccctataaagagcgcaaagtcgccattcttaacggcgcgcacaccgcgctggtgccggtggcgtggctgtgcggcgtcgataccgttggcgaagcgatgcaggacgaagccattcgccattatgtgcagcaaactatcgacgaggagattattccggcgctggatttaccggccgatgagctgaggcagtttgccgatgccgtgaccgggcgctttcttaatccctggattcgccatcagctgctctctatcgccctgaacggcatgaccaaatttcgcacccggatcctgccgcagctgctgacgcatatccgccagcacggcgcaatcccgccgcggctaacgttcgccctggcggcgctcatcgccttctatcgcgggcagcgcgacgggcaggcgtatccgctgcaggatgatgacgtctggctaagccgttttgccgcaggatgggcgcaggtggcgcaaggccgcccgctgcatgaactggtcaccgaagtcctgcaggataccgggcactggggtgaagatctgacggcaataccggggcttgccgaacaggtcacgcggtatctggaagtcattttgagcgcggggatgcgggaggccctgtcgcggctgtaatcggtttgttgtgcggcgcccgcggatttgggcgtcgttttttttgtgctctgaaccgcaaaaaatgaattaagcgccaatggttggtggatttcccgcatcataagagcctatcccattagggctattttgcttgccattttgaacctgggcagtgctcagacaaaactcgcagagttttgaacgccctcagggcggcctggagggggagcgtagcgaataatcctcacgtactacgtgtacgctccggttcttccgcgctggccgtgttcaaactgcctgcgccaataacgcctactggaagaggctctaagtacctatgatggcattgatgggggatgcgatgcgtaaaacggaactgttggcttttctgcaaaatcagaccgatttttttgatccggataacctgagcgaggtcttcaccgccggctacctggcccggcgttttgcgatgcaaagaaacaccgccagccactatctgaatcagctggtggcccaggatgtgctggtgaagattaatacccgtccggtctatttcctgcataaggccgccttctgccagcagtttttccccctttcccgcagcgagtacgccagcatggcggagctgctcgcggagagcgaccggcagccggaacaggcagatcatttttcattgcttaccggccatgacggtagcctgcgcaagcctatcgaacagatgaaaaccgcgctgttttatcccaacggcgggctgccgctgctgatcgtcggcgacagcggaaccggcaaaagctatatggcggagctgatgcacgagtttgccatcgcccagggactgctgccgcccgatgcgccctttgtcagcttcaactgcgcccagtacgccagcaacccggagctgctggccgccaacctgtttggctacgtcaaaggcgcgtttaccggcgcgcagggcgataaagccggggcgtttgaggcggcaaacggcggcgtgctgtttctcgatgaggtccaccgcctcgatgcgcagggccaggagaagctcttcacctggctggaccgcaaagagatctatcgggtgggagagacggcgcaggggatgccgatttcgctgcggctggtgtttgccaccaccgaagatattcacagcacgtttctgaccacctttattcgtcgtattccgatcctcattagcctgcctgatttacaaaatcgcagccgcggcgagaaagaagcgttaacgctgcagtttttctggcaggaggcccgcacgctgtccgcccgactgcagctgacgccccggcttttacaggtgctgacgcactacgtttatcgcggcaacgtcggtgagctgaagaatgtcgtcaagtacgccgtcgcgtcggcgtgggccaggtctccgggcagcgagaggctaaacgtcacgctgcacgatctgccggaaaatatcatggccgcgacgccggcgcttagcgaaccgatgggccagcaggaaccgctgcttattgaaccgcagaccagcctggtctggctgctgcgcgcgcgcgacccggttcaggggctgatctatgatgctcagtgccgcgttctcgcgctgtatgaggcggtgctgagtaaaaaaacggtctgggaagaggcgcaaaaaagcatgggcgaggagatggaaaccctcttcgatcggctgattttcgataatcatgatgccaacagctcgcatctgctgctgctgataacccatcaggtgcgggaggagttttatcgccttgaaaagcgcttcaatattcagtttaacggcaactgtatctacgccctgagccactacctgattcatcgttctcgccaggcgcagtcgacgatgagcaatgagaaaagccgccagctggaggatttcctggcgcagaaatacccgctgctgtatcgcttttgtgaagagatcctcgccgcgctggcgctgaagctggatattgaaccccgacgcattgacctgctgctgctggtgctgtggttacagaaaaacggcgctatcagtcagcagcaggtgacccgggcagttatcctcgcccacggttacgccaccgccagcagcatcgccaacgtggcgaatcggttgctgaaaagccagctgtttgagtcattcgatatgccgctcgacgtgacgccggaggctatcgccgatcaggtgatggcctggatcgagagccacgcgctggcctccggactggtcatcctggtcgatatgggatcgctgaacgccattcacagccacttcaaccgccggctgtccacgccgatggcgattattaataacgtctcgaccgggatggcgatgtacgtcggggagcgggttttgcagggcgatatgctggaagatatcgtccgggagataggcaatgacctcgcggttgagcatcagctctattacccgcaaacggacaaaccgcgggcgattcttacaacctgcgccaccggtctgggggcggcggcgaatctgtcggcgctgttaaaagccagcattcctgagacgctcggcatcgatattgtggcatgcgatgtggaaaccctcgccgatcccgcgcgccgggcaccgatgctcagccgctatgaggtgctggcgattgtcggcaccctcgatccgcatctccccgatctgccgtggatctcgctggattcgctgatttccggcgaaggaagccgcccgctgatgcgtatcttcggcgaactggcctccgctgagcaggtcagcgagatcaataacctgatcctgaaaaatttctcgctgcgccgggtgatcgagtcggtgacgatcctcgataccggtaaagtgatcaatcaggttgagcagtttttactgcgctatgagcatctggccggctgcgatgtgcctaacgatcgcaaggtggcgctgtacgtgcatatcagctgtctgatagagcgcctgatccgcaacgcctcgccatcccattattccggcaaacagtgtccgcagagcgagctggcgacgctccgcgaggcttttagtgtcatagagagtggatatagtgtcaaaatccccgccgtagagctgtactacattcacgatattctgacgcgggaaactgaatttattcaggaagatcaagagttttaatccccttcattagttgatccttgcgctagccggcgcgccactgtttctggcacgccggttgcaatcaagaaagcagtggaatgcgctttcgaggtaaggatgaaacgacactatatttttgccagccatggcacctttgctaacggtctgctgaactccgtggagctgatcctcggtaagcagccggatatttatactctctgcgcctatgtcgaagaggaggccgatctgacgcagcaggtggagacgctgctggcgcgtttccccgcccaggatgagctgattgtcattacggatattttcgccggtagcgtcaataatgagtttgtgcgttttttatcgcgccctaattttcatttattgtccggtttaaacctgccgctgattattgatttacttatttccgcaggcgaagaaaataccgagaaattaatttctgaagcattaacaagcgccaaagagagcattcagtactgcaatcagacgattgccagtgcgatgactattgataaagacttctgaaatgagggaacaccatgattacgctattaagggttgaccatcgattacttcacggccaggtggccttttcctggacccagtatgtcggcgccgattgcattttaatcgccaacgataatgtccctgaagatgagctgcggaaaaccacaattaagctcgctaaaccgccttcggtaaaactggtgattaaaaatattaacgatgctatcgaatcgataaaaagcggcgtgacggagaaatatcatctgtttatcgtcgtggaatcggtcaatgacgcctggcgtattgccagcgccgtcgaggggataaaaagtattaatctcggcggaataaaagccaaagcgggcagtaaaaatatttctaaggcgatcaatttactgccggaagaaattgaacaactgcagcagctggtcgggaaaggcgtcgaagttgagatccgccaggtccctaacgatcgcaaacagctttttgcgcaatgcgtttaactccgcggaggacagattatggtagaggctctcttactgggtctggtggcgtttatcgcgcaatcggaatatgccctggggacgtcgctgatttcgcggccaatcgtcaccgggctgctgaccgggctggtgctgggggatgtacagaccggcgtcatcatgggcgcgacgcttgagctggcgtttatcggctctttctccgtcggcgcatcgatcccgcctgatgtagtaaccggcggtattctcggcgtggcgttcgccattacctccggcgcgggaacggaaacggcgctgctgcttggcctgcccatcgccaccctgacgctgatcctgaaaaacgtctatctggggatgtttatcccgatgctcagccagaaggctgacggctacgcggagcgggcggatacggtcggcattgagcgcatgcatctgattgccggcttcgggctgtcgctgatgctcgccacggtggtgaccatctcattcctggtcggcagcaatgcggtgaaatccctgctcgataccatcccggaatttatcaaacacgggctcagcgtcgctaccggcattattccggcactcggcttcgcaatgctcgccaggctgctgattaataagaaagtcgcgccgtactttttcctcggctttgtgctgatggcctacctgaaaatcccggtgaccggcatcgctattctcggcgctatcgtggcggtggtgatggttaacgtcaccgcgctgagctcacctcgtacgacgacagaacaaggagtcagcgatgacgacgaagatgatttctgaagaaactctgcaaccgcaggcgcaggaagaggcccgtatcacgccgcgcgatctacgccgggtattctggcgctccttccagatggagttttcgtggaactatgagcggcagatgaatctcgcctttgtttacgcgctgattccggtgctgaaaaagctctatccgcgcaaagaggagctggccggggcgttgaaacggcatctggtgttcttcaataccacgccgcatatcgtcaccctgctgctggggatcaccacggcgatggaggagaagaatagccagcagaagaacatggacgccaacgcgattgataacgtcaaagcgtcgctgatggggccgctggccgggctgggggactcctttttctggggcacgctgcgcctgatcgctaccggtatcggcaccagcctggcgctaaagggcaacattctcggccccattctgtttctgctggtgttcaacgtgccgcacatcctggtgcgctggttctttacccgctggggctatgtgctgggcaccggggttctgcagcggatccagaagagcggaatgatggagagcctgacctacggcgcgtcgattatcggcctgatggtggtcggggcgatgaccgcctcaatgattgatatcaccatccccctctcattcggcgccggagaggcgaaaacccaggtgcaggacattatcaacgacatcctgccctgcatgctgccgctggtgagttttggcatcgtttactggctgctggggcgcaaggttaaaccgctttctattatcggcggaatggcgctggtgggcattctggggtcgtggataggtttattttaacgggagtcgaaaatggtaccaacgatgatgacctatatcagcgaagagtcggcctgtctgacgcagatcctgcgcgactaccggcaaaagctggcggcgattgagacctttgcccgccagcacccggtgcgccgcattctgctgttggcgaccggctcgtcgctgaacgccgccctgtgcacgcgctatttctttgagcagcgcttcggcgtcctggttgagattaaagagccgtacaactttacgcactacgaggcggtcgatccgcataccgatctggtggtggcgatttcgcagagcggtaaaagcgcctcgacgctggcggcgatgcgtaaggtacaggcattgagcctgccggtttttgcgctgacctccgatccgcaaagtccgatcgcccgggcctgcgatgggatactggatatcaataccggtatcgagagcgtggggtttgtcacccgcgggtttagcgcgacggtgctgaatttgctgctgatggcgctgatgattgcccgtgcccaggggaaagccagcgaggccgaggagcagcgctatcttgccgaactgcagcggctggcggcggcgatcccggatgtcattgaccgcacctcgcggtttatcgacaggcatggcgaagcgctgcggggcggcgagcgctttgtcgccaccggctatggcgcgctggtgggcgtcgcgaaggagttcgaaaccaaatttaccgaaacggtacgcgtgccttccagcggttttgaacttgaggcctatatgcacggcccctatctggaagccaatgcccgccatgtgatgctgtttattgaagatgcgccggatgcgcggacccgggcgctgcgggactatatggcgccgtccattgcccgcgcctttacgctgacgctgagcgacgaagaggatgcgcagacgctggcgctaagctgcccgtgtgaacatcacctggcgccgctgctgctgattgttcccgtccagatgctggcctggcataccgccggcctgaaaggcatcgatctggctaaacgtatttttgacgattttgatcgcgtcttaaaaagtaaaatctgattattcaggagaaaactatgttgggttttaatcaggacgagtacctgaccagtgctcgcgagatcatcgctgcgcgcaaacaggcggaaaccgttgccgatgatatttatcagagcggctgtagcgccttatttttcgcctcggtgggcggttctttggcgccgatgatggcaataaatgagtttgcaaaagaattaaccagcgtgccggtttaccttgagcaggcggcggaattaattcatcgcggacataaaaaattaaataaagatgcggtggtggtgacgttatccaagtccggcgataccaaagagtcggtagccattgccgaatggtgcaaagcgcaggggattcgcgtggtggccattacccgtaatgccgattcgccattagccgaggcggcgagctggcatattccgatgtgccacaagaacggcgtggaatatgaatatatgctgctcttctggttattcttccgcatcatttatcgtcacggtgatttcgccaattacgatcgttttgccagccagctggagttgctgccggaaaatcttctgcaggccaaacgccagttcgatccgcaggcggataaaatcgccgctcagtatcacggctgcgactatatgatgtggatcggcggggcggaaatgtggggtgaggtctatctgttctcaatgtgtattctcgaagagatgcagtggaagcggaccaaatcggtgagttcagccgagtttttccacggcaccctggagctgctggaaaaagaggtcccgctgttcctggtcaaaggcgagggtaaatgccgggcgctggatgagcgcgtcgaacgcttcgctgagaagatcaccgaccatctggtggtgattgacccgcgcgactatccgctgaacggcattgatgaggctttccgctggattatggcgccgtgcgtggtttccaccctgctggtggacaggctggcggcccattttgaacaccataccgggcatgatcttaatatccgccgttattaccgtcagtttgattactaagctttgctgatggcggccagccgggctggccgctgcgcgattctccgaggcgcttcccataaaatcatcgccaaaaccaacgaagtaaaaaccgatggtagagtccggctctccttctctttcaggcaagcggacggccatgaaaaaacggatgacctcgacgccgcatgatgcggtttttaagcgatttcttcgccacccggagacggcgaatgattttctcacgctgcacctgccggaagcgatccgccagcggtgtgatttttctaccctacggctggagccggcgagctttattgatgaagatctgcgcgcctggtactcggacgtactgtggtcggtacaaaccccctgcggcctgggatatgtgtatgtggtgatagagcaccagagttcgccggataaccatatggcttttcgcctgatgcgctatgccattgccgcgatgcagcggcacctcgacgccgggcacaaaacgctgccgctggtggtaccgatgcttttttatcacggcgcgaccagtccttatcccttttccctgaactggctggatgaatttgccgacccgcagatggcgaggacgctgtacgcctgcccgtttccgctggttgacgtaacggtgatgccggatgatgaaatcgttcagcaccggcgggtcgctctgctggagctgatgcaaaagcatattcgtcagcgcgatctcagcgggattacggagtcgttggcgacccttgtgatgctgggatacactaaccgcaggcagttaagagtgctgtttcattatatgctgcagtacggcaatagcgccgatccgagcgtgtttctccgccgattggcccgccgtctgccacactatgaggagaggttgatgtctatcgctcaaaagctcaagcaggaaggtcggcaagagggaaggcaggaagggatacaggaaggccgacaggaagggatacaggaaggccgacaagaagggcgcctggaaggcctgcaggaagggagccggcgggaagcgctgcgcattgccggcagtatgctgcagaacggtttagataccgagacggtacagcggattaccggactgtcggcggatgagctaaagccgctgcatagctaatttccacccaccgtcaccacggcccggcgcaaaaagccgccgggcacgatggcttatccttcgcttttcaccactttgatttcaaccatgccgatgcccagctgacgcggagagtggccgagaatattgccctcgttcgtggactgcgggtccggcggcgcaatcgtcaacgtactgctgcgcgacggattatcgaaatgcagggtggtggtggtgacatcattggccagcgttagcgtttgttcgctgttgcccacccgtaccggaatcggcttattggcattcggcccgtaggctttggcggtaatcaccagatcgaatttctccggcagcggctctttatattcaattttcacttcactgccgagctgggcattagaccagcgcccccaggtttccggtcgggagatgccgctgaactgcttcacctcttccggcgcgccggcgacgttaaacaggaagctgtcggctttatagcgaatatcgttatcgacgatcttcagcgtatcgacgttgcctttataacgctccatatcgataagggtatctttgaacgcggttttaccttgccactgggctttgtcgacgcgctggactttctgttcgccccccagctggccctgcgagacgcaccagtcggtggagagcgccacttccggcgaccacagctgacccatcttgtagcagcggtcgacccagacgaagttatcgcgcggcgcgaaatcggccagctggaagcgcagcggcgcggagtattcgctttccggcagcggctcaacgcgcttatcggagatacgcagcagcagaggcaggcggaaatggctgccggagaaggagatcatattcttctgtgaatccacggtgaaattcttcatctctttggggaaattccacaggcgtatgatatccggcttccacgccagcaccttctctttcatattgaggaacacggcggagagcgactcgccggaaaggctgctgcggccaaggccaataaagttatcgccgccgaggatatcgagcaccgtcgcgccgttatccatggtattacgcttgatggccagcgtatcctgccggggctcatcgccgcgcagaacgaaaaacaggttgctgcgatcctgcttattcagatagtcccaggcgctgtttttcattgccaggtgatcggatgacaccacgatgaccgtatttttgaaccacggcgaagctttaatcttctcgattaacgccgcgatatgctcctgactacaggagacggcgctgaacgaaagattctttttaccgtccatatcgtagcttttacgctggcaggtgcgggagataaaaccatccggatgatgggtgtcgaccgtcagcgcaaacagcgaaaagcgttttccggactgcgaaagcgcttcgaattttttccaggtttcatcaagaaccgtatcatcgtagaacccccagtcgttacgataggccggatcggcgaccgtggtttttagctcttccgcgccgtacagatgatcgaagccgtgagatttcaggaaaacgtcttttccggcgaagcgcagattagcgccctgcacaaagtagttctcataacccgagtttttcaggatatctccaaggcagatattctgcgggaaaaagctggaaaccgaggccgaggcgttgccttcaaacggcgcaaacagcgggatcccgcactgggaggcgaccattccggcaatcgtgtagtcggtaccggggagctgggcggtgttgctgaagtccagcccctcgcttttcagtttgccgagctctggggtcaggttcgggaacgcatcgttatcaaaataagtgcgctcaaggctttcgccgtaaatgtacaccaggttcagtttcgggttggcgatgctttttgacggctctttgtagtaagccacaaagtcaggatcgccatcgcgggactgggatttaaccaactcgctaatctggcggaaggcggggctggcatccactgacgccagcgccagaaccagcgccaccaggctgtaaccaaagtgatgaggatgatgccggcgacggcggagcacccagccgagtgcgccaaataccgcgaccagcgcgacgaccagccccacgcccggcagaatatatttgcccacgccggcgcccgtcaggctgttggtcaacgtataaagtaccgcgtcattgataccgtcgccggtgaagtaattgctggcgtagagggtaatattcagaacaacgaacaggcccagcaccgtgagggtggcggcgaaccaccaggtattacgaccggcttttaatgcgtaaatcatcaccgaagcaagaaacagggcgatggataacaactctgacacagctcatcctcattcacgccagctgtcggctggccagatagatcttttttcacgctacactgtaattgcagcgcaatattgccgcaattgtatcgtcatgaatttgtgctgtggttcagaattggtttagaaatcgccgtttttgaactgcctcacatccagtcagccaggggatttgggggaaagatgttaaaaaacagacgttgccgccgcgcaggccagggtaacgcgccaaacgcggcattaagaggataaaatcaggagaggaagctcacgccctgttttaagaccagatcgcaggctttggttttcactttttccgccagcgggctgctgccaagggtgttcagattcagctgctggccgtctttactggtcagcaagccctgaaggccctcaagatagctggtgtcctctttttgtttttccggcgtgctgagacccagcttatccagaacctgatttttaacgttttcggtattggtaaccgaagccagcttctgtttcgcgcagtaagacataatcccggcggcattattcatgctgctggaagtcaacgactggctgccgccgttgagcaaaccggtcagcgaagagagggacataccgccgctttgctggcttccgctctgactgctgagctggttagcggcgctggagagcgaatcctgccaggaggtggcgtgcgcgccaaaggtcaataaagcgccggccaccattgccgtgcggaacaacgtttttgcagatttcatagacgtactcttcgccgtgactgaataatcccctgattataacgccggcggggttcagaaatatcttaatactcttttccggttacgcgatcgcggtagctgtcccagttgaagttaacccacaggctattgcccagccgcatccggtccatcacgcgctcgccgagcagcttgttcatctcgtccatggtgctgttggttaacataccggtagggcgctttgacgaagagcggcgatcgacgatctggttaataatcactttttcgtagcgtgattccgtttgcatgccgatttcgtcaatcaccagcaggtccaccttgctcaggtcggtgagcagctgctcttcgctggtttcccggttgccaaaggtatctttcatcgctgacatgatatcggcgacggtgataatcaacaccgacttaccccgaagcagcagttcgttgcagatagcggcggcgaggtggttttttccggtacccggtttgccggagaagataaagctggcgatattgccgtcgaactcctcgacgtactggcgcgcccgggacagcgcaatcatctggccttcacactccacccggtagttatccagcgagcagttttgatgcagcgggcggatgccggagcggttaaaggttcgctgcattttcatggcccggttttcgcgttccagcgcctcagaacgcagcttgccctgttctttttgccatgccagcagctcctcacctgtcttaaacgcgggttcgacatgggctggcatcatcttttgcaggcgcttcattaaatcgccgacatttttcatgctcatcctcggaatcctcgtggaatgtgattatcaggttcgctaatcgcgttgacgtcccggcgcggctggccgccgttgctggcccggccaatctgtacgctgcgcgccagcttctgctgccactggacatgatgaaagactttaccttccgcctgccagtaagcgacaaatgccgccagctcttccggcgtcacgggctggctcagggcgatgccccacagcgcggccaggcgctgaaaatccgcatccggctgccagtcggcgtacatcggaaatttccccatcggaaccgcaacgggggtcgccgtcggctcgtcaaaaaactgcgcgtccagcgcaatatcgctgttaggacgcgcgagttttgcttccagctccagcagctgcgccagacgctccggcgtcagcgcatagaatgcgggggcgttgttggcaaatacggcgacggcgccgctggccgattttgccagtaccgctgcgtgatcctgcatgaagtcatccagaccgctaaaatcggtagttaatattcgtgaagacataaatcaatctcaactctgaacaactaaaaagagaggggtagctgcacacatagtagcatagaggtcgctcaggaaggagcgccgcgggcgacccggcggcgcgattagctagacgcgcggacgcttgcgatacagccaaagcccggggatagacaagccaatggataatgcgccaacgatcgatgaagccttaagaaagttgctcagcagcataatcatcatctcttccgagtagccgaaatggctgattttcaccgctgaaatcatcgcggtataggcggagataccggggaacatcgggatcaccgccgctacggtaaaaatcttcgggtgcgccagataccagcgggaccactggataccgatgctgccaaccagcagtgccgccataaacgtcgcccactcaatattaaaacccgccgtcatcatgaccatgcgcgagccgtggccgatagcgcccagcagcgcgcaccagcgcagcgcccgctgcgggacgttgaacaccatggcgaacccgacggcgggaatggctgccagcatcatatccagcgccagttcgtagagatagaaaattatgcccatccgcgtagcccccacatcgtcatcgccatcaccacgccgatacaggtggcgagcgtcagtaggctggcaatggcccagcgcgccagaccggtgttgatatgccccttaaacatgtcggcaacggcgttgatcagcggaaaaccgggtaccagcagcagcacgctggcggccatcgcgatcgtcggcgtgctggtgaaagccggcaggcgcagcatcagcccggagatagtcgttgcgacgaaggcggtgaggcaaaagttgatttgcggatgcattgaacgatgggtgagtacctggcgaatatacatggctaccgtactggcgcagaaggtgaccagcgcaccgtcccagccgccgttgttaagtttgcaaaagcaggcgcaggagaggccgaccatgaaaaccagcagccagcgcggatagcgcagcggcttgatttgcgcgaatcgcttttcgacatccttataatccagcagcttatgctctgccataatcacaatatgttgaacctccgtgacgacgtgcatgttgatgccgcgatcggtgttttttcgcgttgaggtcagacactccccgtccttaatagtggtgagaacaatcgcattcgaagagatggcgctttccacgctatccatccctaaggccagacccagacgggttgagagctcctcaaccagcgcgctttccgcgccgtgttgtaataagaaaagaccacattgaatacacaatcgcgtgatagcgcgctgagttgcccgatctgcttgcataaatacctgctgtccgtgatgcccgttgccgtagtgtctggcgatacttttacctgaagtcttgttttagctgagcggtcaggatcaaacaatgtgtaaaaaaccacccgctctacgggaaccctgaaatttgaactctgccacacttccgcaagattggtgaaaagtccaatttttgcacccgtttctcccttctttttcccatcagagttatcaaaaatgcaaattcaaacttttaataaacaaaaaacaaacaaataattaaccgtgctgaggcgatgcgatgaaaacacaggtggcgattatcggagcgggtccgtcgggactcctgctggggcagttattacatcacgccgggattcagaccgtcatccttgagcgacagacgcctgagtatgtgctggggaggatccgcgcgggaattctggaaagcggaacggtagaactgctgcgcgaagccggggcggggcggcgaatggatgcggaagggctggtccatcacggcgtcgaattcttgtttgagggcaagcgcgtaccggttccgctgacggaactgacggcaggcaaaagcgtgatggtgtatggccagaccgaagtgacgcgggatttgatggcggcgcgggaggcatgcggggcagcgacgatttatggcgtcagcgatgtcaccattaatgaggcaaaaagcgatcgaccgtcggtctcttttatcaacaatggcgaaaactgccgccttgagtgcgactttatcgccggctgcgacggctttcacggcgtgtcccgccagagcatcccggcaggggtgctgaaagagtacgagagcgtctggccgtttggctggctcgggctgctggccgatacgccaccggtgaacccggagctgatttacgcccaccacgagcgggggtttgtactctgtagtcagcgctcactaactcgaagccgctattatctgcaggtaccgcttagcgaaaaggtggaggagtggtctgatgaacgtttctggactgaactcaagcggcgtctccctgatgagctgaccaataagttagtaatcggtcactctcttgagaagagtatcgcgccgctgcgcagctatgtagtggagccgatgcagtacgggaggctatttctgctgggggatgcggcgcatatcgtaccgcctaccggggcgaaggggctgaatctcgcggcgtccgatgtgaactatctttggcggatcctgcgtgagtattatcaccatggccgtattgacctcttagccagctactcgcgtttggcgctggatagagtgtggaaaggtgagcgattcagctggtttatgacgcgtctgctgcatgattttccgcaacaaagcgagttcgacagaaaaatgcaggcggcggatcgtcgctactatcttgaatcacgcgccgggttaaccactatcgctgaaaactatgtgggtctgccgatggaacgcgtggcgtaatagaaaaggctctggagtcgtgatgcaggcagcgagtaccattcccgttttcaaactgtatggcgaagatcagggctggccaacgcccgatcttctgcactgtgagtctatactccagcgcagccatctttatgaatggcatatccgcgtgcatcagcacgcagagctggtgcagctactgtatctgcataaagggcgggcggagattgaaatcgaaggcgcgacgaccgtgatgacggagtcctgtattcaggtggttccggcgctatgtattcatggatttcgcttttcgccgggtacggagggctacgttttgtcgctggcgctgccgctgctcggaagccttgaaaatcagtttggcagtcagctggatgtgctcggccacccgcgttgcgtgccggtgaagagctcccggggccatatccgggcgctgtttaccgctttgcaagaggagtaccgcgaagattacgatgcgcgcgaaatgatgcttcattcactgctgggagcgctgttggtctggctgaatcggcaatatcaaccgcagctcataacggaggacaaagcggaacgtaagcggagcgtcatgcgtcatttctcgcgccttatcgaaagccactatcgtgaacatatgccattagccgggtatgccagggaggtgggggtgtctgcgactcatttgaattatttgtgtcatgaattttatggctgcagcgcactgggggttttacatcaaaggttgatgcttgaggcgcgtcgcaacctgcagtacaccagcatgactatcgctcaactttctgattacttagggtttactgatgcggcctatttttctcgcttctttcgccgctatagcggtgaatcaccaaaagtatttaggaaaaaaataaaataaataaatctttatttaatatatcttaagttagcgtatctaacgacgatgttaaccatttctaatttattgatgacaactacctgtgttaatgttaatcattggtatggataacagcaatatgttactcctcattattaagttggctttagggtgcgatatcgcgcacccgccagggatgataaatattcatttgggcaaaataattacgatgactattaaattatgcatccaattgtttttccgccggcggtgagtcttcgacaggaagcggagggtttatgttaccaggacaaggtaagttcggcattattatcagcagaataccggttatgcagtccggcttaaaagccatcgttggggagcatctccctgattatgaattgagtttttgtcgttctcaggatgagctaaccctgctgcagctgcgtcgtgcagtgttagtcattgctgacttgtccggtgaaatagagcatccaagaaatatttgcgaacattactactctttaatgactcaatacagggatatacactgggtctttatggtaggcaacgcctgttttccgttagctgttcaattattaatgcgtcctgaaagtacattaatttcggacagcgagccggtaaaacgtctcattgaggttgtgcgcgcgggtggacttgccgctgaacgaattagccagacgttgttctctcctgaggtagaacgcatcgatgaagaaccgcaaaagctggttattctgactctttctgagcgtaaagtgttgagacttcttgcaaaaggatggggaattaatcaaattgctgctttattgaagaagagcaataaaaccataagtgcgcagaaaaatagtgctatgcgccgcttatctttgcgtagtaatgcagagatgtatgcctggattaatagtgcacagggaatgaaggagctgaatatttattcagcctatggagatcaaacagaatggaaaaagacctcacaacaagatatgtcgctatcgtagagaaatgtgcgatgacagaagtggcgcttcgccacatattaattaatgaaagtggtaagaattatcgtattcagttctttaaagatacgatggcgttaaaacgggagtttcaggcgagagatttttctgcgattattttttcactttcaggtaaccgcagatcccgacttgaaagcttgctctttcttcatgagatcgcgcgttattgtcccgacacgcaaagaattatcttagctaatgatgaagcggaaatgcgtttggtcagccatctgacgccttctcgcttacacggtattttgaataaatcggcctgtcggctacagctgcaggagtgcttgcttcagcttctcgagcgtagctatccggcgaatgagagctcgttaagccaaaagcagagtatctatagccaacttttgagcccaacggaacataccatcctgcgatatatgtcttatggctactcgttgccggaaatagcgacgcagctggaacgcaatatcaaaacgattcgggcccataagtttaacgccatgaccaagctcggcgtgagttctgatatgggactactgagcgcggcagacattcttatgcgcctgtcggcgaataatgatgatgccacggtgatgcgccttgctcagtagcctcagcggtctgttaaagacacacgtcaatccacttagcatcagtcagctgcgccaaccgttcaggtgaaatacgaacggcgctatatattgaacctgctgctggcagcacttccgggtactgcctcagtgagatatcgcagtacacagccagcggaacttccaggccaaatgggcagacgccgccaatggggtgtcccgtcagcgtaatgacctcatcgctgcttagcatacgggctttggcgccaaaggcttcctttagctttttattatccaggcgtgcatcgcctttcgcgacaacgagaacaaccctttcttttatttttaaagacagggttttggcgatttgcccgggttcaacgttatgcgccgctgcggctaacgctaccgtggccgtgctctgagtaagttcgatgatttcgatatcgggggcgtggtcagtaaaaaactgccgcacggactgcagactcattggaatctcctgattaaggcttgttaaaaatctgtcacaagcttcgcaaagtgtaaatatccatggtagagaatcaagattctttttaatttctggatctccttcacattcaccgcaaccggttactgtaaccggttgcggttattcacggagacaggaatactgacaaggtaacttccctgcgtcacctataacaaagagccgaagatgaatcgaacctggttgagcagtcgggccagcaggctacccgattgggtaaccctctcgccgaagcgggttcatcataacggcaagataatcgttgttgggcctgttcatctagcctgtcaggagggctgctatgtctgctaaccatgctgcatttaatctgatatttcgcttcgtagaaaattacatcagccctgtcgccggacgcatctcgtctcagcgccacgttatggcaatccgcgacggttttatctccgccatgccgtttatgattgtcggctcttttctgctggtatttgcgtatccgccgttttcaccggataccacatggggatttgcccgcgcctggctggatctggcaaaagagtttgaagggcgaattctgacgccgttcgatatgacgatgggcattatgtcgatctatatttgtgccgcgatcgcctataacctcggcaagcattacgaaaaaaccaatcagctcgacccctttatgtgcgccatgctgtcgattatggccttcctgctggtggcggcgccaaaaacgaacggcagcctgccggtagatagcctgggaggaacgggcatatttacggcgattctggtggcggtctactgcgttgaaatgatgcgcttcctgaaggcgcataatatcggtattcgcctgccggatcaggtgccgccgatgatcaaaaactcgtttgatctgttgatcccggtactggttgtcgtcctgacgctctatcccctgagcctgcttattcagcatcattttgatatgctgatccctcaggcgattatggctatctttaagccgctggtttccgcagcggactccttacccgcaattttgttggcggttctggtgggccacctgctgtggtttgcggggatccacggtgcggccattgtttccggcatgctgcaaatgttctggctcactaacctcggcatgaaccagcaggccctggctcagggggctccgctgccgcatatctttatggaagcgttctggacattctttattgtgattggcggttcaggggcgacgatggggctggtattctgctatctgcgcagccgctccgcgcatctgcgttcgattggccgtctgagcgtggtgccaagcctgtttaacatcaacgagccggttatttttggcacccctatcgtgatgaacccggtattctttattcccttcctgctggcgccgatggttaacgccgtactggcctgggcggcaatgaagctggatcttatcggccgggtgatttcggttgtaccgtggactgctccggcgccgattggcggcgcgtgggcgctggggtgggatttccgggcggcgattctggtggtcgtcctggcctgcgtttcggcgattatctacttcccattcttcaaggtgtacgagaaacagctgctcgcgcaggaggccgaagaggcgcagcgcatggcggaagagagtcagcaaacggcataaaaacaaacgggcggctgaatagccgcccgtttgttttcaccatcgattatttcagcgtacagtccccgcactgctgtacgtccggcaggcgatagcgctggcagcaggtgcggcgcacgagctgcccttcacgtaaaaccaccgtacgccacagcgggttatcctcaccgcctgatagctgtttgttgaagaagaagagctgacgcagcgcggccactttttcatctccgaccagggttctcatttccccgagataccagttaatcaaataacccgtattgctccagataagtttgccattgatatcgccagtggcttcaagcgcctgcaccacgggttgcaaagcggtggtgaccagcttttccatccgggactgcgcggattctgccggggaagtacctgctgaatggatatcaatccagaaacaggcggcacggcctgtttcatgaaactcgacgcgaaaatgctccggcgccaggctaacggcgcgttcttcactcaacagcgccagcattaaagggggcaccaataaaccgatgtaccattgtgcccagagggatagcagcggtttttgctcacgggcttgcccgggctggttgcgataaatatggtcagaatacgtcgcgattaacgaactcagcgtcgcgggctgcgaccactcagccagggtgagggcatgatgaggggcttcttcattcagacggataaaatccagcaaatgcggacgtaacgcggtaattttgtcccgtattgcgttcgccagttcacgctcagccgaagggagcggagcccgccagatgatctcattgttgaatgcgagtgaacggtaagccatcgggtgccagatacaaatctaaatgataatgatttctgatactaatgccgcggcaccggcttggcaagagatttgtccgcgcggcgacgcctgccgcgcggtaaaggcctagctggtgagaataatgttacgtcccatatttttggcttcgtagagcgcgttgtccgcccgtttcagcgcgctgtcgatatccgcatccatcagcggcgtcatgccgatactgatggtcacgttggtcgcgacgctttcattaaacatatgcgggattttcagatcgtagacccgctggcggatgcgctctgcggcctgaagagcgttttccgcactgctgctggtcaacagtaccataaactcctcgccgccaaagcgggcaacgatgtcacgcgagcgcacggcgttacgaatggcggcggagacctgaatcaaagcctggtcgcccatcatatgcccgtagtggtcgttgtaggctttgaaatgatcaatgtccagcagcagaacgtaatgcccggcgccgtcgagagaaagaatggtgtccagccggttttgtaagccccggcgattatacaaaccggtaagcggatccaacatactgagatcgttaagggtattgcgttccttcagcagcttatccatgagcccctgcgtgaatacatcgctgcgtttctgaataaggctttgcagggtgataccggcaataggcaacagaaagcaccaggacatgcgcagccattgttctcctccgccaagaatcaggcagataaggtatgtgggtaaagagtgcaaagtaaagccaatgatattgctggaaaaagcaatggtgccaataaataacacgcttaataaggcgatcaccaggtagttaaaatgcggcggccccatcaccattgcttttagcgcaacgtgccacgcccaaagcaggccaaatagcagagaaataaccggaatatttattttgtgctgagagaatttacagtgccatagcagcaggaccgtgctgcaggcaactatcagaaaacagggtaatgtaaaagtgatgacggtaaagagcgggctgacaagggataagacggatgaaactaaattaagcagtaaaaatagccgtaaggaatactgatatttctgttcgtaatgggagcgccaggattgtgcagtcatgtcggagttgtcattattaatcgttaaaattcaatgtgatgttagtttgaagtgaataataaaaaacagtgcgcaaaataaggtttttacgaaataatcagataatttaatatattatttttttgccgcttaatttatcaccttcatgaatgtatgtcattaccacaaacgtaaagaataaggacgcgctattttcctgggatgacaaatgataaaaattatcatatgatattggttatcattatcgttgtaagaggcgaaaacatgttgcagcgaactttagggagtgggtggggcgtgttgatccctggcgtactgattgccgtcctcgggtttgccgatttgtcggtagatgcctggcgcggattggtgacgctgggaatgctcatgtcagcggtgatgatttggcaccgtcagctaaggcactttgttctgctgccatcatgcgtggcgctggtcagtgggatgatgctggtaataatgaatttgaagctgatgggataaaacggaagggtaagaatattggtgcgaggggggggacttgaacccccacgtccgtaaggacactaacacctgaagctagcgcgtctaccaattccgccaccttcgcacagtattcttaatttttgatatcgcctcgttggtgcgaggggggggacttgaacccccacgtccgtaagaacactaacacctgaagctagcgcgtctaccaattccgccaccttcgcccagtgcgagcaatatcaacgtggattatggtgcgaggggggggacttgaacccccacgtccgtaaggacactaacacctgaagctagcgcgtctaccaattccgccaccttcgcataccatcgacactatgaaagtatcgttaccacggaggcgcattctagtggttttcagctattcgtcaatagttaattgtatcagttggattgattgttgcaaaaatggacggtcagagaggaaaaacatcggcgaccagcgtctgctggcgccgaaaaaacgcgggattatttcttcgcctgacgggtcatcaccgtccggtagaccttaaagcggcccgtttgggcaatcacttcatggaagccgaagatctcatccagcacgttcggatagggcaggaaggcgttagcgacgatgcgcagctcgccgccgctgttcaaatgacgaacggcgccgcgaatcagcgtttgcgcggcctccaggctggtctgtagaccatcgtggaaaggcgggttggagataatcatgtcgaagcggccgttcacttcagagaacacgttgctggcgaacacttccccttcgatgccgttagcggccagtgtggcgcgactggcttcaactgccggggcgctgacgtcgcacaacgagaggcggactttaggcgagtggctggccagcacggttgccagcacgccagcgccgcagccgacatcaagcactttacctttggtatgcggcgtcagcgtggaaagcagcagctggctaccgacatccaggccatcgcggctgaagacgcccggcagcgttttaatcgtcagattatccagcgaatactcgccccagtactgttctgcattgaacgcgggctgtttttccaggcgaccgtgatacagcccacagcggcgcgcgctgtcgactttgctcagcggcgcatattccgccagcatctgctcggcgctgcgtacgccgctgcggttctcgccaaccacgaaaatatcaataccggtcggcagcagcgaaagcaggttcatcagctgaaactgcgcttccggtttgttctttggccagtagtaaatcagcgtatcgcaatcggcgacatcgccggcctctgcgaccaggctatagcgggcattttcgcccatctggcggctcagtacctgccagtggtggaactgctgggtatgggcgcggctggcggccgtgtccagacgtgcgggcaggtcatcctgcaggtcaccggcaaacagaacgcgggcggactcgaaatcatcactgtggcgcagcaagacttcacttgccggggtaaaagcggacatgaaacactccttcattaagactggcgccgattatacacgttatctttcggcctgcctctttgttggcggcgggatgcgctccgaccgccgcgtagtttgttggcgcagatacgacggatttgctatattgcgcgcttaattaacaggagtgtttcgctatgacatcccgacgagactggcaattacagcagctgggcatcacccagtggtcgctacgtcgtcctggggcgttacagggtgaaatcgctatctcgcttcctggacacattcgtctggtgatggtggcggaagaaccgccatcgctgaccgaaccgcttatcagcgatattctgcgcgcgctggccctgatgccggagcaggtgatgcagctgacgcctgaacgcgttgcgatgctgcctcaggacgcacgctgtaatagctggcggctcggcaccgacgcgccgctgctgctggcgggcgcacagctttccacgcccgcattcgatgaacttcagaccagcacgcctgctcgcatggcgctctggcaacagatttgcgcacatgaacacgatttctaccctcaatccggctgatttgccccgcgcctggcaaattgaaacgcgcgcccacgcttttccgtggagcgaacagacgtttgccagtaatcagggcgagcgctatctgaatcttcaactgtccgtggacggcgtgatggcggcctttgccattacgcaaatcgtgctcgacgaagcgacgctgttcaatattgccgtcgaccccgctttccagcgtcgcggtctgggcagggcgctgctggaacgggtgattgatgaagttgaaaaacgcggcgtcgtcacgctgtggctggaggtgcgcgcgtctaacgtcgccgccatcgcgctctatgaaagcttaggctttaacgaggcgacgattcgccgcaactattaccccacggtcgacggacgtgaggacgccatcataatggcactgccaatcagtatgtaagacaaggtgatacgatgaagtgggactggattttctttgatgccgacgaaacgttatttacgtttgactcatttagcggcctacagcggatgtttctcgactatagcgtgacgttctccgcagaggattttcaggactaccaggccgtgaataagccgctatgggtggattatcaaaacggcgccattacctctcttcagctgcagcatcagcgctttgacggttgggcggaacgcctgaacgtccctcccggcgagctgaacgccgcgtttatgaacgcgatggcggagatctgctcgccgctgccgggggcggtatcgctgcttgattcgctgcaggggaaggtaaaaatgggcatcatcaccaacggttttacctcactgcagcagacgcgtcttgaacgtaccggactgcgcgatcactttgatttgctcattatttccgaagaggttggggtggctaagccggatgcgcgtattttcgactatgcgctggcgcaggcgggcaatcccgatcgttcgcgggtgctgatggttggcgatacggcggaatcggatattcgcggcggcgtgaatgccggcctggcgacctgctggttcaacccccatcagcgcgaactgcccgcggacctccgcgcggactggacggtcacctctttaagcgaactggagcaactcctgtgtaaacactgattgcctcccccccattgatgggtaaaatagccgcaattttttcgtattcaacatgcgcggcgcgttgccgcgtttactaagaagattgaattatgacgttgtctccttatttgcaggaggtggccaagcgccgcacttttgccattatttctcacccggatgccggtaaaacgaccattactgaaaaggtactgttattcggacaggctattcagaccgccggaacggtgaaaggtcgcggctccagccagcatgcgaaatctgactggatggagatggaaaagcagcgcggtatctccatcaccacgtccgtgatgcagttcccgtatcacgactgcctggttaacctgctggataccccgggccacgaagacttctccgaggatacctaccgtaccctgacggcggtggactgctgcctgatggttatcgatgccgcgaaaggcgtcgaggatcgtacccgtaagctgatggaagtcacccgtctgcgcgatacgccgatcctgacgttcatgaacaaactcgaccgcgacattcgcgatccgatggagctgctggatgaagtggaaaacgagctgaaaatcggctgtgcgccgatcacctggccgattggctgcggcaaactgttcaagggcgtttaccatctttataaagatgaaacctacctgtatcagaccggtaaaggccacaccatccaggaagtgcgcatcgtgaaggggctggataacccggagcttgatgccgcggtgggtgaagacctggcgcagcagctgcgcgatgagctggagctggtgcagggcgcgtctaacgaattcgataaagagctgttcctggcgggcgaaattacgccggtattcttcggcaccgcgctgggtaactttggcgtcgatcatatgctggacggtttagtggagtgggcgcccgcgccgatgccgcgcaaaaccgacacccgcaccgtggaggccgcggaggagaagttcaccggcttcgtctttaaaattcaggccaacatggacccgaaacaccgcgaccgcgtggcctttatgcgcgtggtttccggtaagtacgagaagggtatgaagatgcgccaggtgcgtatcggcaaggacgtggtgatctccgacgcgctgacctttatggccggcgaccgttcgcatgtggaagaggcgtatccgggcgatatcctgggtctgcataaccacggcaccattcagattggcgataccttcacccagggtgaaatgatgaagttcaccggtatcccgaacttcgccccggaactgttccgccgcattcgcctgaaagatccgctcaagcagaaacagctgctgaaagggctggttcagctctctgaagagggagcggtgcaggtgttccgtccgatcgccaataacgatctgatcgttggcgcggtgggtgtgctgcagtttgatgtggttgttgctcgcctgaagagcgagtacaacgttgaggcgatttacgagtccgtcaacgtcgcgaccgcacgctgggtggaatgcagcgacgcgaagaaattcgaagagtttaagcgtaagaacgaaattcagctggcgctggatggcggcgataacctgacttatatcgccccgaccatggttaacctgaacctgacgcaggaacgttaccctgacgtccagttccgtaaaacccgcgagcactaatcctctccggagcgcggttttcgccgcgctccacgccattttcccctcggattgccctttctggaaagttcttaattcttaccgttttgcgcgcttttttacccgttaatgccgcactcttccgcgtatctactacatttaataagtaatttttggaatcctggcttaatagactacttattttgctttacctgcttagatataacgaggaacaacgatgacaaaacttaagagcggcaagacactcctggccctcttcctgggctcagcaataatcagcgcttcggcgtatgcggaaaactcgaccgcagatagcgcaaaatctgcagcaagcaatgccgggcaagccgtcgataattcgatgaacaaagtcgggaattttatggacgacagcaccatcaccgccagggtgaaagcggcgctgatcgatcataaagatattcgcagcaccgatatctctgtgaaaactgaaaacaaagtcgtcacgttaagcggtacggttgacagttcagagcagcataagcaggcgcttagcgtagcgaaagcggttgaaggcgtgacctccgttaacgacaagcttagcgtacagaacgaaaaatctgcttcgctgaagggctacgccggcgacacggcggtgaccagcgagatcaaagcgaaattactggctgacgatatcgttccgtcgcgtaacgtgaaggtggagaccaccgatggcgttgtacatttatccggtacggtagagtccagtaagcagtcggagcgggcggaaggtattgcgaaagccgtttccggcgtcaaaagcgtgaagaatgaccttagcgtcaaataaatctattcactaaaaaaatttattctgcggtctttccgcaggatgtgtagcaccacagggttgtgtatgcgcggcctgagtgcgcagaaaatcgaccgtcattaactatggtaaggagagacgtatgtttagatggggcattatttttctggtgatcgcgttaattgccgccgctctgggctttggtggcctggcgggtaccgctgcctgggctgcgaaaattgtcttcgttgtcggtattatcctgttcctggtcagcctgttcaccggccgtcggcgtccctagacgttaacgcgtgaaataccgtcttacataaagccagtcaatgtgactggctttctcagtttcagggcgttaaaaattgcgttacctttgtttttataataagccagacaggaaagcagggtggggcagcgaattcccgttacgttgggcaacattacgccgttatctgttaaacccttccagccgggcaggctcgcactggtgtgcgaaggcggggggcagagagggatttttaccgccggggtactggacgaatttatgcgcgcgggattcaacccgtttgacatgatgttcggtacctctgccggggcgcaaaatctctcggcctatctgtgcaaccagcccggctatgcccgcaaagtgatcacccgctacaccaccgcccgcgagtttttcgacccgatgcgttttgtgcgcggcgggaatcttatcgatcttgactggctggtcgacaccacctcgaaaaagatgccgctggcgatggcctatgctgaagattgttttgctcagggaaaagagttctggatgtgcgcctgtcgcggcgatgattacacgccaaactacttttcccccactcagcagacctggcttgacctgattcgcgcctccagcgccattcccggtttttaccgcagcggcgtgctgctggatggcgtgagctatcttgacggcggcgtcagcgatgcgatccccgtacaggaagcggcccgtcgaggggcgcaaaccatcgtggtgatccgcaccgttccgtcccagatgtactacacgccgcagtggtttaaacggatggagcgctggcttggcgaaagtagtctgcagccgtttgtgaatctggtgcagcatcacgaaaccacctatcgctccacgcaagagttcattgaaaaaccgccgggtaagctgagaattctggaaatttatccgcagaaaccgttgaagagtatggcgttaggcagccgtcttccggcgttgctggaggactacaagaccggacgccagtgcgggcgctactttctcgctaccgtcggtaaactgctggccgacagaccgccgctgctgcgccatgcgccgcgtattgcggtaccgaaaacggtcgttattccgccagcgccggtggccaatgagatccctcaggcgccggtcatcgcggcggtgcaggccaatgatgccagctttgaaaatgaggacctggcgtgaccctacgatttattgatacccactgccatttcgattttccccctttcaccggcgacgaaagcgccagcattgcccgggcggcggaggctggcgtgacgcagatcgtggtacctgcgacagaagcggttaacttcgcccgcgtgttagcgctggcggagaaatatgatgcgctctacgccgccttaggcctccacccgatagcgattgaacggcatagcgcagagagtcttgaacggcttgaagcctgcctggcgaaacgcgacgctaagctggtcgcggttggggagatcggtctcgatctctatcgggaagatccgcagtttgcacgtcaggtttctgtatttgaggcgcagatgcggctggcgaaacgctacgatttgccggcgatcctccactccagacgcactcacgacaagctggcgatgctgctgaaaaagcacgctttaccgcgaaccggcgtagtgcacggttttgccggtagccttcagcaggcggagcggtttgtgcagctgggctacaagattggcgttggcggcaccattacctatccgcgcgccagtaagacccgcggtgtgatcgcgcagctgccgctttcggcgctgctgctggagaccgatgcgccggatatgccgttgaacggtttccaggggcagccgaacaggccggaacgggcggctcgcgtcttctccaccttatgtgagctacgctctgagcccgcggaagagatagcgaataccctgattgataatacaaatgcgctttttgcgcttccgtagcgctttgctgagtgacctgtgtctcattcctgcctttttatctcattgttttgcttaaaatgtgtgagctgaaatgagcatgatggtttcatgccgttataatcgcggggttttaaggctgaactctcaatacacagggactctgtatgcaaattatcatgggacttgtcggcatggtggtgctgttagccatcgctgtgctcctctccagtaatcgaaaagccatcaacctgcgtaccgtcctcggcgcctggattatccaggtggggatcggcgcgttaattctctacgtgccggccgggcgcaccgcgctgctggccatgtcgaacggcgttgccaacgtgattgcttacggcaatgaagggatcggctttatctttggcgggctggtttccgacaagatgtttgaagtcttcggcggcggcgggtttgtttttgccctgcgcgtcctgccggtcatcgtcttcttctcatcgctgatcgccgtgctttattacctcggcatcatgcagtttgttatccgcattctcggcggggcgctgcgcgcggtactgaaaacctcgcgcacggaatcgctctctgccacggcgaacatcttcgttggccagaccgaagcgccgctggtggtgcgtccatatatcgccaccatgacccgttccgagctcttcgcggtgatgtgcgggggcctggcctcggttgcgggctccgttctggccggttacgcgcagatgggcgtaccgctggaatacctgattgccgcttcgtttatggcggcgccgggcggcctgctgttcgcgaagattatcgtgccggaaaccgagcagccccgggacaacccggcgatggaaaaaaacgacgccgatccgcaggcgccggcgaacgtgctggatgccgccgcgtccggcgcggcttccgggatgcagctggcgcttaacgtcggggcgatgctgctggcgtttatcgcgctgattgccctggttaacggtattctctccggcgtgggcggctggtttaaccatccggatctgtcgctgcaaatgatcctcggctgggtcttctcgccgctggcgtgggtgattggcgttccgtggaatgaggccaccgttgccggctcgtttatcggccagaagctgattatcaacgagtttgtggcctacatgaatttcggtgaatacctgaaagccgacgccgaggtcgcagccgccggtttgcaggtgatttcaacccacaccaaggccatcatctcgtttgccctgtgcggttttgccaatctgtcatccattgcgattctgattggcggactgggcggcatggcgcctaatcgccgccaggaaattgcccagctgggcatgcgggccgtggcggcggggacgctgtctaatctgatgagcgccacgatagcgggcgtcttcctcgcgctatagcgccgtcgttaatcacgaccctaccccgcggcaccgccgccgcggggaactctcctctgcgtgttaaaatcctatcatttaataattatctgtttatcaatcactcatgatgcatctggcattttttcgcacaaaatgtccgcgctgatatcgaggtttaccgcgtgggtatgttacaataataacattgcctcgatgctgagattcctgattatgcttaaagagagtctggccttcggggggcatgcacagggatttattatgtgattcatatcactctacagtaatgcaaattagtaattagttttcattaactgtgatgtatatcgaagtgtaacggcgaggggatgttacaatagtaacagactcgcaaggtgaacaaactttaatacggcaatacgccgtcggagtatgaaatgactgatttaacggcaagcagcctgcgcgcgttgaaattgatggacctgaccaccctgaacgatgacgacaccaatgaaaaagtgatcgcgctgtgccaccaggccaaaacaccggtagggaatactgccgcagtatgcatctacccgcgctttatcccgatcgcgcgtaaaacgctgaacgagcagggtaccccggatatccggatcgcgacggtgaccaatttcccgcacggtaacgatgatattgctattgcgctggcggaaacccgcgcggcgatagcttacggcgcagacgaagttgacgtcgtattcccttaccgcgcgctgatggccggcaacgaacaggtgggttttgacctggtgaaagcctgtaaagaagcctgcgcggcggcaaacgtgctgctgaaagtgattatcgaaaccggtgagctgaaagaagaagcgctgattcgtaaagcatctgaaatcgccatcaaagccggtgccgattttatcaaaacgtctaccggtaaagttccggtcaatgcgaccccggaaagcgcgcgcatcatgctggaagtcatccgcgatatgggcgttcagcagagcgtcggcttcaaaccggcgggcggcgtgcgtagcgcagaagacgcgcaaaagttcctcgctattgccgatgaactgttcggtgccgactgggccgactctcgtcactaccgctttggcgcttccagcctgctggcaagcctgctgaaagcgctgggtcacggcgatggtaagagcgccagcagctactaatacgtaatttgcctgacctcaaggccggatgctgtccggcctgtggttggtctttgactctttcctcgggaggttatcttgtttctcgcacaagaaattattcgtaaaaaacgtgatggtcatgcgctgagcgatgaagagattcgttttttcatcaacggcatccgcgacaacaccatctcagaagggcagatcgccgcgctggcgatgaccatttttttccacgatatgtctatgccggaacgcgtttcgctgaccatggcgatgcgggattcagggaccgttctcgactggaagagtcttaacctcaatggcccgatcgtcgataaacactctaccggcggcgtaggcgatgtgacctcgctgatgctggggccgatggtcgcggcctgcggcggctatgtcccgatgatctcggggcgcggtctcgggcacaccggcggtacgctcgacaagctggaagcgattcctgggttcgatattttcccggacgatagccgcttccgtgaaatcattaaagatgtcggcgtcgcgattatcgggcagaccagctctctggcaccggcggacaaacgtttttacgccacgcgcgatatcaccgcaacggtggactctatcccgctgatcaccgcctccattctcgccaagaagctggcggaaggcctggacgcgctggtgatggatgtcaaagtcggcagcggcgcctttatgcctacttatgagctttccgccgcgctggccgaagcgatcgtcggggtatccaacggcgccggcgtgcggacgaccgcgctgttaaccgatatgaaccaggtgctggcttccagcgccggtaatgcggtggaagtgcgtgaagccgtgcagttcctcaccggcgagtaccgcaatccgcggctgcttgaggtgacgatggcgctgtgcgtcgagatgctgatttccggcaagctggcgcagaatgacgccgacgcgcgggcgaagctacaggcggtgctggataacggtaaagccgcagaagtcttcggccggatggtggcggcgcaaaaagggccgaacgacttcgtggaaaactacgataagtatctgccggccgcgatgctgagcaaagccgtctatgccgaaggcgaagggtttgtcgccgaaatggacacccgcgcgctgggcatggcggtggtgtcaatgggcggcggtcgccgtcaggcatcggatctgattgattacagcgtcggtttcaccgacgtggttcgcctcggcgcgcgtatcgacgcgcagcagccgctggcggttatccatgctaaagatgaaaacagctggcaggaagcggccaaagccgtgaaagcggccattaaacttgacgataaagcgcctgaaatgacgccgacggtctatcgtcgtatcaccgaatagttatatactgatctgatcgcttttttgcagcgcaaaaggtacggagaataatatgaaacgtgcatttattatggtgctggactcattcggcatcggtgcgactgaagacgccgatcgctttggcgacgtcggttcagacaccatgggccatattgcagaagcctgtgccaaaggcgaggctgacaacggccgcaatggcccgctcaatctaccgaatctgacccgtctggggctggttaaagcccatgagggttctaccggtaaaattgccgccggtatggacggcagcgcggacgttatcggcgcctacgcatgggcgcatgagctctcttccggtaaagacaccccgtcaggccactgggaaatcgccggcgtgccggttctgtttgactggggctacttccccgagcatgaaaacagcttcccgcaggaacttctggataaactggttaagcgcgcaaacctgccgggctacctcggcaactgccactcttccggtaccgttatcctcgaccagctgggcgaagagcatatgaaaaccggcaagccgattttctatacctccgctgactcggtattccagattgcctgtcatgaagagacctttggtctcgataagctgtacgagctgtgtgaaatcgcgcgtgaagagctgaccgaaggcggctacaacatcggtcgcgttatcgcgcgtccgtttatcggcgacaaagccggcaacttccagcgcaccggtaaccgccacgatttggccgttgagccgccggcgccgacggtgctgcagaagctggtcgacgagaaaaagggccaggttgtatcggtgggtaaaatcgccgatatctacgccaactgcggtattaccaaaaaggtgaaggcgaccggcctggatgcgctgtttgacgccaccatcaaagagatgaaagaagcgggagacgagaccatcgtcttcaccaacttcgtggacttcgactcttcctggggccaccgccgcgacgttgcaggctatgccgcagggttggagctgttcgatcgccgtctgccggagctgatggaactggtcggggaagatgacattctgatcctgaccgccgaccacggctgcgacccgacctggaccggtaccgaccatacccgcgagcacattccggtgctgatctatggcccgaaagtgaagccgggttctctgggtcaccgcgaaaccttcgccgatatcggccagaccctggcaacgtacttcggtacgtctccgatggaatacggcaaaaacatgctgtgattatttgcccggtgagcctcgctcgccgggccttttttgtcgacctgattaggcatagccgccatcaggtaaaacattcagaaggatttaacgatggctactccacacattaacgcagaaatgggcgatttcgctgacgttgtgctgatgcctggtgacccgctgcgcgcgaagcacattgcagaaacgttccttgaagatgtccgcgaagtgaataacgtgcgcggtatgctgggcttcaccggtacctacaaaggccgcaaaatttccgtgatgggtcacggcatggggatcccgtcctgctccatttacgcaaaagagctgatcaccgacttcggcgtcaaaaaaatcattcgcgtcggctcctgcggtgccgtgcgtatggacgttaagctgcgcgacgtggttatcggcatgggtgcctgcaccgactctaaagttaaccgtatgcgttttaaggaccacgactttgcggcgattgccgactttggcatggtgcgtaacgcggttgacgcggcaaaagcgctgggcgttgacgctcgcgtgggcaacattttctctgctgacctgttctatgcgccggacggcggcgaaatgttcgacgtgatggaaaaatacggcatcctgggcgtggaaatggaagcggctggcatctacggcgtcgcggcggaatttggtgccaaagcgctgaccatctgcacggtctccgaccacatccgtacccacgagcagaccagctccgctgaacgtcagacgaccttcaacgacatgattaaaatcgcgctggaatccgttctgctgggcgataaagaataatcatctcttcggccctctcccatagggagagggccggggtgaccgcacgttagcgtaccgcgccggcaatccatgccgagagctcccgcagcgctttctcctgctccggaaaatccacgagtaatgcatcgcactcctgctgcagcatatccgcgcggtagaggcatccctgtagcctggcggccagcgcttccagcggcgccgggttgaggctgtcggtaaaaatctgcgtacgcgtgatatggcctttttcgacgtcgaaatggagctctacgccgccccaggtaaaacgttcatccagcagatggctgaaggccggagcctggccaaagttccactcccagctgctctggcgggcaaaggtcgcggcaaaattcggcaggtccggcattttctccggagagatcacttcggcctccacgcgctcgccgtaatgggcgaagaacgcctcctgaatcgcttcgcaaacctgctgatgggtaatgcccggcagcagctcgaccagattggctacccgtccgcgcacggaggtaatgcctttggcctgcagcttcttcttatcgggattgaggtagttggccaggcggcttaaatcggcgttcagcagcagcgtaccgtggtgaaagccgcgatccatcgtttcgcgataggcggaaccggagaccttgcggtcgccttcggcggttttgaccaccagatcgttgcggcccgaggcttccgccgctacgcccagcgcattcagcgccgtcagcacgatatttgtggaaacggttttatcgtactccggtttgccggccataaaggtaaagcaggtattgcccagatcgtggaataccgcgccgccgccgctgctgcgacgggccaggcgcacgttatcttcttccatacgtcgggtgttgcactctttccacgggttctgcgcgcggccaatgaccaccgtatcggcattgcgccacagaaacagcacccgttgagtcgcgggcatctggcgaaaaatagactcctcaaccgccagattgaaccaggggtcgtaagagtcggagagcagcaggcgcagcgtggacatggcgatttccttattctgattcatctttatcttcatcctgcaccggcttattggcggtgagcaggaaaggcgattgctgccagcgggtacgtttaccctgcagcagggtgcgcgtcaggacgacgccgatggccagagatagcagcagcatcagacgcaggatattggtggtattatcgacctgctgagcttcggtggccagggtatgggtatccagcgtcaggcgcaggtagccgagcgggccgtttttaccctgaacaggttcgacgatttgctggttgaagtagccgccggcttttttaccgtccagcgccagccgatcgcgtacctcgacgctttcgccggaacgcgccaccaggtcgccctgttcgtcatatacgccggcgtcgaggatccggcttttatgggtaagctgatccagcagctggctaatccgcttttcgtcgggcgtttcgctacgcatcagcggcgccaggttgagcgtgacctgctgggcgagcgtgcgggccagctcttccagctgcggattgcgctgcttctggctgttctggctgaaccatgaggccccctgcatcagggcgacgaggagcgcgagacagatcagaacaatcaccgcgcgatgcagccggaatttaagttttgcgcgtaccatattccacctttgaaaatttgcagcttaatgttgccagaagcgctggttacaaggtagcctcatgcgttattttcctcgcctgaatgaagttatgtggagccgtgatgccaaacagtttgacctggtgcgacctgcctgaagatgtttcccagtggcctggattgccgctttccctgagcggtgatgaggtcatgccgttggattatcacgccggacgcagcggctggctgctgtatggccgcggtcttaacaagcgtcgcctgaccgagtggcagcgcgaactgggggcggccctggtgattgttgcctcctgggcggttgacgactatcaggtgattcggttggctggttctttaacgctacgggcgacccgtctggcccatgaggccggttttgacgtcgcgccgctgggtaaaatcccgcatttacgtacgccggggctgctggtcatggatatggactcgacggcgattcagattgagtgcattgatgaaatcgccaaactggccggtaccggcgagctggtctctgaagtgaccgagcgcgcgatgcgcggcgaacttgattttaccgccagcctgcgccagcgggtggcgacgctgaaagatgccgatgccaatattctgctgcaggtgcgggaaacgctgccgctgatgccgggcctgacccagctggtgctgaagctggaaacgctcggctggaaagtggcgatcgcctccggcggcttcaccttctttgccgagtatctgcgcgacaagctgcatctcgacgcggtggtcgccaacgaactggagatcatggacggtaagctgaccggcaacgttatcggcgatatcgtcgatgcgaaatacaaagccaatacgctgcgtaaactggcggaaaagtatgagatcccgccggcgcaaaccgtcgccattggcgatggcgcaaacgatctgccgatgattaaagcggcagggctcggcatcgcctatcatgctaagcccaaagttaatgaactggcggaagtgacaatccgccacgctgacctgatgggggtattctgtattctctccggcagcatgaatcaaaagtaagaggttaacgtggcgaaagctccaaaacgcgcatttgtctgtaatgaatgcggtgcggattatccgcgctggcaggggcagtgcagcgcctgtcatgcctggaataccataaccgagatgcgcattgccgcttcgccccaggtggcaagaaacgaacgtctgtcaggatatgccggtaatgccggcgtatcgaaagtgcagaagctctccgatatcagcctcgaagcgctgccgcgcttttcgaccggctttaaagagtttgaccgcgtgctcggcggcggcgtggtgccggggagcgcgattctgatcggcggcaaccccggcgcgggtaagtcgactctgctgctgcaaaccctgtgtaagctcgccgaaggtatgaaaacgctctacgtcaccggggaagagtcgcttcagcaggtggcgatgcgcgctcaccgtttaggcctgccgacggctaacctcaatatgctgtcagaaaccagcattgagcagatttgccagattgccgatgaagaaaagccgcagctgatggttatcgactccatccaggtgatgcatatggccgacgtacagtcgtcgccgggcagcgtggcccaggtgcgcgaaacggcggcctatttaacgcgctttgccaagacgcgcggcgtggctatcgtcatggtcggccacgtgaccaaagacggctcgctggccgggccgaaagtgctggagcactgtatcgactgctccgtgctgctcgacggcgacgccgattctcgtttccgcaccctgcgcagtcataaaaaccgcttcggcgcggtcaacgagctgggcgtattcgccatgaccgagcaggggctacgtgaagtgagcaacccctcggctatctttctgagccgcggtgacgaagtgacttccggcagttcggtgatggtggtctgggaaggcacgcgaccgctgctggtggagatccaggcgctggtcgatcactcgatgatgtccaacccgcgccgcgtggcggtggggctggagcagaaccgtctggcgatcctgctggcggttctgcatcgtcacggcggtctgcagatggccgaccaggacgtcttcgtcaacgtcgttggtggcgtaaaggtcaccgaaaccagcgccgatctggcgctgctgctggcgatggtttccagcctgcgcgaccgtccgctgccccaggacctggtggttttcggcgaagtgggtctggcaggcgagattcgcccggtgccgagcggccaggagcgtatttcagaagcggctaagcatggttttcgtcgggcgattgttccggcagccaatgtgccgaaaaaagtgccggaagggatgcaaatctttggcgtgaaaaagcttgcggacgcacttagcgtctttgacgacttataataagttaaaaggagactcgcgatgtcgtcatttgactatttaaaaagcgccattaagcagaaggggtgtacgctacagcaggtagctgacgccagcgggatgacaaaaggctatctgagccagctgctgaacgcgaaaattaaaagccccagcgcgcagaagctggaagcgctgcaccggtttctcgggctggagtttccgcgtcggcaaaaaagcgttggcgtggtatttggtaagttttacccgctgcataccggacacatctatttgattcagcgcgcctgtagccaggtcgatgagctgcacatcattatgggctacgacgatccccgcgaccgcgagctgtttgaaaagagcgcgatgtcgcagcagccgaccgtgcccgatcgcctgcgctggctgctgcagaccttcaagtaccagaaaaatatccgcatccacgccttcaatgaagaggggatggaaccttatccgcacggctgggacgtctggagccgcgggattcgcgcctttatgaacgagaagggcattgagcctaactggatctacacctcggaagagggcgacgcgccgcagtatctggatcatctgggaattgaaaccgtactcatcgatcctaaacgcacctttatgaacatcagcggcgggcagattcgtgaaaatccgttccgctattgggaatatattcctactgaagtgaagccgtttttcgtgcgcacggtggcgatcctgggcggtgaatcgagcggtaagtcgacgctggtgaataagctatccaatatctttaataccaccagcgcctgggagtatggccgcgactacgtcttttcgcacctcggcggcgatgagatggcgctgcaatattccgactacgacaagattgccctcggccacgcgcagtatattgatttcgcggtgaagtatgccaacaaggtggcgttcatcgacacggactttgtcagcacccaggcgttctgtctcaagtacgaagggcgggaacatccctttgtgcaggcgctgatcgacgagtatcgttttgacctggtcatcctgctggaaaacaacacgccgtgggtggccgatggtttgcgtagccttggcagctcggtggaccgcaaagagtttcagacgctgctggtgtcgttgcttaaggaaaacgagatagattttgtgcatgtaaaagaggccgactacgatgcccgcttcctgcgctgcgtggagctggtgaaagagatgatgggcgagcagggataggccttctgcggcctgatgccgcataaatgcctgcggcgggctacaaccctctcccagcgggggagggggcaaacacgaaaaagggcaacctgcgttgcccttttgcttttatttcgcgatacgtttgtacttaatacgcttcggctccagcgcatcggcgccgagggtgcgtttcttgtactcttcgtattcggtaaagttaccttcgaagaactccaccttaccttcatcctggtagtccagaatgtgggtcgcgatgcggtcgaggaaccagcggtcgtgcgagataaccatcgcacagcccgggaactccagcagggcgttttccagcgcgcgcagggtttcgatatccaggtcgttggtgggctcatcgagcagcaggacgttaccgcccacctgcagcagcttcgccaggtgcagacgaccgcgctcaccgccggacagctcgccaacgcgcttgccctggtcaacgcctttgaagttaaagcggcccacgtaggcgcggctcggcatctcggtgttgccaatcttcatgatatccagcccgccggaaacttcttcccatacggttttgctgttgtccatcgcgtcgcggaactgatcgacggaggccagcttgacggtttcacccagggtgattgaaccggcatcaggctgttcctgaccggacatcatgcggaacagggtggatttacccgcgccgttcgggccgatgatgccgacgatagcgcctttcggtaccgagaagctcaggtcgtcgatcagcagacggtcgccgtaggacttacgcaggttgctgacttccacgactttatcccccagacgtgcgcctggcggaataaacagttcgttagtctcgttgcgcttctggtactcgacgttgttaagctcttcaaagcgcgccagacgggctttgcccttagactgacggcctttcgcgccctgacggacccactccagctctttctcgattgacttacggcgcgccgcttcctgagaagcttcctgcgccagacgctgatctttctgctccagccaggaggagtagttgccttcccacggaataccttcgccgcggtcaagctcaaggatccagccggcgacgttatcgaggaagtagcggtcgtgggtaattgccacgacggtgccttcgaaatcgtgcaggaagcgttccagccacgcgacggactctgcatccaggtggttagtcggttcgtcgagcagcagcatgtctggtttttccagcagcaggcggcacagcgcgacgcggcggcgctcaccgccggacaggttggcgattttcgcgtcccagtccggcagacgcagggcatccgccgcgcgctcaagctggacgttcaggttatggccatcgtgcgcctggataatctcttcgaacttgccctgctgagcggcgagcttgtcgaagtcggcatccggctccgcgtatttggcgtacacctcgtccagacctttcagggcgttgaccacttcggccaccgcttcttcaaccgactcacggacggtctgctccggattgagctgcggctcctgcggcagatagccgattttcaggcccggctgcggacgggcttcgccttcgatatcggtatcgatgccggccatgatgcgcagcagggtagacttaccggcgccgttcagaccgagaacgccgatttttgcgccagggaaaaagctcagggagatatttttcagaatatgacgtttcggcggaaccactttgccgacacgatgcatggtataaacgaattgagccacgttggacttcgcctcttttatatactcttcatccctcaggctcgcttgatgcagccagaatgattttgagtagggtagtgaatagttttcaaaggcgaagtgtagcctttttcgcgctttaatcccagcgaggcgatgggattcacaaaagcgtaaaaaaatgtccgggacgtggcgcgattcgcgttgtctgattagcatatctacgtaatacctgaaatttttgcccgcggcatgatgctgctgtggtgtatctgaatagaggaagagcttgtggaaaaagccaaaactgtgacgtggcgtcttctggccgccggcgtaagtctgctgacgttaagccaactggcgcatgcggattcactggatgaacagcgcagccgctatgctcaaattaaacaggcgtgggacagtcgacaaatggacgtcgtcaaccagctgatgcccaccctgacgacctatccgctctatccttatctccagtaccggcagattaccgacgatctgatgaaccagccggcgctggtggtgaccaactttatcgctgccaacccgacgctgccccccgcgcgctcgctgaaatcacggttcgtcaatgaactggcgcgccgtagcgactggcgcggcctgctggccttcagtccggataagccgaccggcaccgaggcgcagtgcaattactactatgcgaagtggaacgtcggccaggctcaggaggcctgggacggcgccaaagcgctgtggctgagcggcaaaagtcagccaaacgcctgtgaccagctgtttggcgcctggcgcgcctccggccagcaggatccgctggcctaccttgaacgcattcgcctggcgatgaaagcgggcaataccagcctggtgcgggtcctggcccagcagatgcctgccgattatcaaacgatttcgacggcggtcatcgcgctggctaacgatcccaacagcgtgatgacgttcgcccggacaaccggcgcgacggattttacccgccagatggcggcggtcgcgtttgccagcgttgcgcggcaggatgtggaaaatgcgcgcctgatgatcccctcattagcgcaggcgcagcagctcaatgaagatcagattcaggagctgcgggacatcgtcgcctggcgcctgatgggcagcgacgtgaccgaagagcaggccatctggcgcgacgatgccattatgcgttcgcaatccacctcgctggtggagcgccgggtacgtatggcgctgggtcttggggaccgccggggcctgaacacctggctggcgcgcttgccgatggaggcgaaagagaaggacgaatggcgctactggcaggccgatctgctgctggagcgcgggcgcgatgacgaagcgaaagatattctccgctcgctgatgcagcagcgcggcttctatccgatggtcgccgcgcagcgccttggcgaggagtacaggttccgcatcgataaagcgccagcgaacctcgatccggcgctgacctcggggccggaaatggcgcgggtgcgcgaactgatgtactggaatatggataacaccgcccgcagcgagtgggccaatctggtcaccagcaagaccaaagaccagcaggcgcagctggctcgttacgcgtttaatcagaactggtgggatctcagcgtccaggccaccatcgccggcaaattgtgggatcagctggaagagcgtttcccgctggcctataacgacctctttacccgctatatcagcggtaaagatattccgcaaagctacgcgatggccattgcgcgtcaggagagcgcctggaacccgaaagccggttcaccggttggcgcccgcggtctgatgcagattatgccggggacggcaacgcatacggtgagcatgttcagtattcccggctatagcggtccatcgcagctgctcgatccggaaatgaacatcaacattggtaccagctatctgcagtatgtttatcagcagtttggcaataaccgtatcttcgcctccgcggcctataacgccggtcccgggcgggtgcgcacgtggcggggcaacagcggcggccgcattgacgcggtggcgtttattgagagcattccgttctctgaaacgcgcggctacgtgaaaaacgttttgtcctatgacgcctactatcgctattttatgggccagaaagagacgctgctgagcgatgcggagtggaagctgcgctattaatatcgccgtcgtcgggcaacatcgtatttcgcgatgttgcccgaaatccgtagagtccggacagaagtatgttatgctttgtactcgttagtgagtacattcgacaggtggcgtaacatgacccaacaatccccctattcagcggcggtggccgaacagcgtcatcaggagtggctgcgttttgttgctctcctgcagcaggcgtacgccgacgatctccatctgccgcttttacagctcatgctgacgcccgacgagcgcgaggcgctgggcacgcgggtgcgtattattgaagagctgctgcgcggcgagatgagccagcgcgagctgaaaaacgagctcggcgccgggatcgccaccattacccgcggttcgaacagcctgaagtcagccccgccggagctgcgtctgtggctggagcaggcgttgattaacgttaacgataaatagcgttatgaaacgggcttagcgccagcacgacggcctgatgataaacgctgctgcgcgtcagttttccggccgtaaatacgccgatagcgccctctttacggccaatttcatcgatgccggtatactgagacatcaccggccccagcgcttctcctgcctggactttttcaagaatgacctgcggcagcggcagggtcgccgagcgcgcttcgccgcgcaggctgccgtcctcgatcgtcacccagctaaaggtgctgccctcatcgatgccggcttcaatagcgacccagaagtcagcattgggctgcgcgcgacgcgcgttggccacgcggtttcgtgcgccagcgcgcgtttcgttgctgccaaaaggctgttccggcacgccgctctcgacggagacggactcaatgtggcaggatccttcgccgaagatctcgttaaaagcctgcagaattgcctgaattttggcgggattagtggtagctgagacaacatggtgcataatcaaaacaactcagaaatactaaacatcatcgcagtatactccaaatcattcttgttgcaggcggctatgcttgtagcttaatggttaagagctcataacggataataaagcatgttacaggtataccttgttcgccacggtgaaacgcagtggaacgccgagcgacgtattcagggccagtccgacagtccgcttaccgcccacggtgagcgtcaggcctggcaggtaggcgagcgcgccagaacgctggggattacgcatattatcgccagcgatttaggccggacgcggcgtaccgcagaaatcatcgctgaagcctgcggatgcagcgtcatgaccgattcacgcttgcgtgagctggatatgggcgtgctggaaaagcgccatatcgactcgctgagcgaagaagaagagggctggcgtcgacagctggttaatggtacgcccgacgggcgcatcccgcagggagagtcaatgcaggagctgagcgaccgtatgcacgcggcgctgacctcttgtctggagctgcccgcaggtagccggccgctgctggtgagccacggcatggcgctggggtgtctggtgagtacgattcttggcttgcccgcctatgcggagcgtcgcctgcgtctgcgcaactgctctatctctcgcgttgactatcagcaaagcccctggctggcgtcgggatgggtcgtggaaaccgcgggggatgtctcgcatcttgatgcccccgcgatggatgagctacagcgttaacgacgaatcggaatcaggtattcgcagcgcagctgaataggcggttcctgattccggttttcatcttccgggaagaagcgttcgatatccaggcccttacgacgagtgagattgagcatcggcatgcaggtgccgtaaaccgtcagaataaattcctgtagcccggtgcccaatccttcgtaggtaaacatcacgtattcgccgccttccagcgtcaccgggtgggcgttgtgcagatggccgttagccagctccggcgtcagcgcggtggtgtaaaacacctcctgctcatcgtctttatcgaggctcggacgcggctcatgcaggccgtacagcgtcggaggaatcgatggcgtattggcgaggaattcacgccagaactgcacgcgcatctgattacggaaatcggagatctcttccagcttgcaggtatagctctgggtcacgccgaccagctgagtggtgttcagcgtgacgaattcgtactgcggcatggtgaactcgcccagacgcagcggaggacgcataccgtaagagctccagtcgggggagcgtcggtaaagggctggcgtcaacgagaactgttttttaaatgcgcgagtaaaagtctgctgcgagtcaaagcgatactgcagcgcaatatcgagaattggacgcgcggtcaggcgtagggcaaccgctgacttagataagcgacgggcgcgaatataggcaccaatggcatggccggtcacgtccttgaacattctttgcagatgccacttggaatagcccgccttcgctgccacattgtccagtgagagtggctgatccaggtgaccttccagccagctaaggagatcgcgaataatccctgcttgatccataaaatatccccatccttaaactcaggtgcctgatactaaaggtagcggataatagcattttttgatgttttagcattcagtgttttttttgcttttaaatgcgattcttccagaagtatcggtggtaattttgtaaagctgtgatctataaaacttttctgcttaatgtgtgataatcactcagctaaatttttaagaatggtaacaatatgaaatacaagaagttagtggcaggtatgcttttactggcggggtctcagatggcgcaggcggagcaaattggctctgtggataccgtgtttaagttccttgggccggatcataaaattgtcgtagaggcctttgacgacccggatgtacaaaacgtgacgtgctacatcagccgggcgaaaaccgggggaattaaaggcgggttagggctggcggaagatacctctgatgctgcgatctcctgtcagcaggtggggccgattgagctgacggataaaatcaaaaacggtaaaacgcagggcgatgtcgtgttccagaaacgcacctcgctggtatttaaaaagctgcaggtggtgcgcttttacgatgccaaacgcaatgcgctggtctatctgacctattcggataaaatcgtcgatggctcgccgaagaacgcgattagcgcggtgccgattatgccatggaataaataacagggaacgccgatgcaacaaccgcggatctggttggtggaagatgagatgagcatcgccgatacgctcgtctaccagctgcagcaggaaggatttctcgttacggcgttcgagcgcggactgccggcgctcgatgcggcacatcaccaccaacccgacctggcgattctcgacgtcgggctgccggatatcagcgggtttgagctctgtcggcggctgcttgcccgctacccggcgctgccggtgctgttcctgacggcccgcagcgaagaggtggataagctgcttggcctggaaatcggcgctgatgactatattgccaagccattttcccctcgtgaagtttgcgccagagttcgcaccgttctgcggcggctgcagaagttcgccgcccctccaccgctcttgcgcgtgggggagttcacattgaacgacgccgcggctcgggtcacctggtgcggtcagagcctgaatctgacccgctatgagtttttattattaaaaacgctactgcactctccggggcgcattttttcccgccagcagctgatggagcaggtatggggcgatgcgaacgagagcttcgatcgtaccgtggatactcatatcaaaacgctgcgcgctaagctgcgagaagtgaaccctgacatctcccccatcaatacgcaccgcggcatgggatacagccttggaggcttctgatgcgcatcggtatgcggctgctgatgggctactttttgattgtggcgatcgcggcctggtttgtgctttccatcttcgttcaggagattaaacccggggtccggcgggcaaccgaagggacgctgattgatacggctaccctgcttgccgagctggcccgcgaggatttactctccgccgatccccagcacgggcgcctggcccaggcttttcaaacgctgcatcgccagccgatcaacgccaacattgccggcattaataaagttcgcaatgaatatcacgtctatatgaccgatgcgcagggcaaggtggtgtttgattctgcgggcagtgcgctggggcaagactactcgcgctggaacgatgtctggctcactttacgcgggcaatacggcgcgcgcagcacgcgcagcgatccgaacgatgataacagctcggtgatgtatattgccgcgccggtgactgacagcggccgaatcattggcgtgctaagcgtcgggaaacccaacctggccatggcgccggtcattaaacgcagcgagcggcgtattctgtgggccggcggggcgctgctggggatcgcgctcctgataggcgctgcgatggtatggtggattaacttttccatcggcaagctggttcgctacgcggactccgtgaccgccgatcgtccggttccgctgccgaatctgggcggcagcgaactgcgtaagctggcgcaggcgctggagagtatgcgccttaagcttgaaggtaaaaacgccattgaaaactatatttatgcgctgacccatgagctgaagagcccgctggcggcgattcgcggcgcggcagaaattctccgtgaggctcctccgcctgaggtcgcagcccgttttacgcgtaatattctggcgcagaacgcgcgaatgcagtcgctggtggaaaatttgctccagcaggcccggctggagaaccggctggagatcgcccgacgtcccgtccccgtcgctgagctatttcatcgcctggccgaggagcgcgagatcgcgctggcggcgaaaaaagtgacgctgcgctggcaggatacacctctgatggttgaaggcgatcgggagcttctggcgcaggcgttgggtaatctccttgataatgctatcgatttcacgccttccgcaggtgaaatcctgcttggggcggaagagcgtgatggcggcgtgctgttaaccgtatgcgatacgggatgcggcattcccgactacgccctggggcgtatttttgaacgtttctattccctgcctcgtgaaaatgggcaaaaaagcagtggcctggggctggcgtttgttcgtgaagtcgcgcgcctgcatcagggggatatccagctggttaaccgccctgaaggcggcgcgtgcgctttgctgacacttcacgctcacttcacatagcttcaaactctccccacacggcccctttaaggtgagcgcatcactaaggagagggctatgttgaaatcaccactattctggaaaatgagcaccctgctggggtgcattttactgttgtcgatcccgctgatgctggtccggcagctgatcgttgaacgcgcggactatcgtagcgacgtggttgacgcgctggagagcagcaccagcggatcgcagaaactggccggaccgctgattgccattccggtaaccgagacgctaacgcgggttgagggaactaaaacggtagaatatcaaacccaatgggtacactactggctgccggagacgctggcggtcaccggtaatcaggatgttgaatcacggcgaatcggtatctatgaggggcagatctggcacaataatctcagcgtcaaagcgcattttgatccttcgcgcatcaaggcgctcaggaagcagacgattacgctgggcagaccgtttctggttgtcagcgtcagcgatgcgcgcggtattggcgagattaagtcaccagagctcaatggcgagaggctacccgttgagcctgggccgggtctcgacgatagcggggagggcattcatatgccgatgccgctgttactccctgaacaaaaagcgctggatattgaattcacgctcaatctgaatggcagcggcagcttctcggtggttccgcttgggcgcaacagtaccttacagcttgccggcaactggccgcacccgggtttccttggcgactttttacctgcaaagcgggaagtcagcccaacaggctatagcgcccagtggcaaagcacctggtttgccaacaatatggcgaagttttttgttgagggtcggcagattgagtggcgtcagttgcccgctttcaacgtgaatgtcaccacgcccgccgatcaatatcagctgaccgatcgggcgacaaaatatgccgttctgttgataacgctgacgtttatggcattttttgtttttgaaagcttaacgcggtatcgcatgcaccccatgcagtatctgctggtggggctgtcgctggtcatgttctatctggtgctgctggcgctgtccgaacatatcggttttacagcatcgtggattgccgccagcctgctaggcgcgctcatcaacggggtgtatcttcaggcagtattgaatggttggcgtaacagtttactgttcgtctgcgcgctactgctgctggacggcgttatgtggatgctgttgcgatcggaagatagcgcattgctgctggggaccggcgtattgctgctggcgttaagtgcgctgatgttcctgacccgccacgttgactggtacgcgttatctctgccgaaggcaaaaggtgagctgccggacgctggtcaggatgacgataagctcaggatctggaaataaaaaaacggcgcgaattgcgccgtttttacgttatgacagcaagaaaaatggtgttattcctgcaggtcgccacagaagcggtacccctcgccatggatggtggcgataatttccggggtgtccggagtggattcaaaatgcttacgaatgcgacggatggtcacgtccacggtacggtcgtgcggcttcagctcacggccggtcattttcttcagcagttccgcacgcgactggattttgcccggattttcgcagaagtgcagcatggcgcggaattcactgcgcggcagcttgtactgctcaccattggggcttaccagcgagcggctattgatatccagctcccagccgttgaacttgtagctttccacgctacggcgctcttcgctcacggtacccaggttcatggtacgggagagcaggttgcgcgcgcggatcgtcagttcacgtgggttgaacggtttagtgatataatcatcggcgccaatttcgaggccaaggattttatccacttcgttatcgcggccggtgaggaacatcagcgcgacgtccgcctgctcacgcagttcgcgtgctaacaggagaccatttttacccggcaggttgatatccatgatcaccaggttgatatcattttcagacaggatctgatgcatttccgcgccatcggtcgcttcgaatacatcataaccttctgcttcgaaaatactttttaacgtgttgcgtgttaccaactcgtcttcaacgataagaatgtgcggggtctgcatgtttgctacctaaattgccaactaaatcgaaacaggaagtaccaaagtccctgacctgcctggtgcatgtcgcaaattaacatgcccggcgtaacatgactaaagtacgtaattgcgttcttgatgcactttccatcaacgtcaacaacatcattagcttggtcgtgggtactttccctctggacccgacggtgtcaaaaacggctgtcatcctaaccattttaacagcaacataacaggctaagtgaggcatgacacccaataaaactacgcttcgttgacatatatcaagttcaattgtagcacgttaacagtcttgtgaaatcattgcatctaaacgggattcatcttcacaattcatacttcgctcaattagttgcaatgagaaaataataaacgcggtgaatccaaagcctcaaaacgtactcggacgtaaatttcattgccaaacatacggataaagccgttctgttaacatactctgtgtcatggtgccttgggaatagtttagttttttttatgggtgataaagctcaaatttagtgatttttgttgcaaatttgtaaattcacggcgcgtaaaatgagggaaaaaatcgttattcccaccgcctaaaaggtaaaagagaaaccgaatgcgtttatcaattgtattagtgtccccggctcgggcggaaaacgtcggggcggcagccagagcgatgaaaaccatggggtttagcgacatgcgtatcgtcgatagcgaggcgcatttgcagcccgccgcgcgctgggtcgcgcacggttctggcgatatcctcgataatatcaacacttatgccacgctggagcaggcgctgcacgatgttgattttaccgtggccacgaccgcccgcagccgggcgcgtttccactactacgcgacgccgcagcagctcctgccgctgctggaagaaaaagcgcagtggatgcatcatgccgcgctggtgtttggtcgggaagattctggtctgacgaatgaagagctggcccttgccgatgtgttgaccggtgtgccgatggcggctgactatccttcgctaaacctggggcagtcggtgatggtctattgctaccagctgacctcattgctgcagcgggccccgtcaacctccgccgacgcagatgataatcagctgcaggcgttacgcctgcgaacgcgcgctctgcttaaccgcctcggcgcgggtgacgatgtaaaactgtccgactggctggagcagcggataggacttttgcagcagcgagacaccgccatgctgcatcgtttactgcacgatattgaaaaaaacctcccagggtaaaatgctgtcatattattttcatatggtcttatgtgctaattatttgcgtctggatgcgtaaatgcggatgaattgtcaggttgctatggcgtattggccaggtgtgaaaaaaagggctaaaagtagaaattcgttgacttaagtcgacagatactttaaccaatataggcacaggacacagacagataaaaattacagagtacacaacatccatgaatcgcatcggcatgatcaccacgattatcaccaccactattaccacaggtaacggtgcgggctgacgcgtacaggaaacacagaaaaaagcccgcacctgaacagtgcgggcttttttttcgataaaaaatcaaggggtcataaccatgcgtgtgttgaagttcggcggtacatcagtggcaaatgcagaacgttttctgcgtgttgccgatattctggagagtaatgccaggcaggggcaggtagcgaccgtactgtctgccccggcgaagatcactaaccatctggttgcgatgatcgaaaaaaccattggcgggcaggatgcgctgaccaatatcgctgatgccgaacgcattttcgccgaacttctgcaaggcctcgccgatgcccagccgggctttccgcacgctcagttgaaaatgtttgtcgagcaggagtttgcgcaaatcaaacacgtcctgcacggtattagcctgctcggacagtgcccggatagcgtcaatgcgtctctgatctgccggggagaaaagctctccatcgctattatggccggcttactggaagcgcgcggtcataacgtcacggtgattaatccggttgaaaaactgcttgccgttggccattacctcgaatccaccgtggatatcgccgagtcgacccgccgcattgccgccagccagatcccggctgaccatatggtgctgatggcgggctttaccgccggtaacgaaaagggcgaactggtggtgctgggccgtaacggctctgactactccgcagcggtgctggccgcctgcctgcgcgccgactgctgtgaaatctggaccgacgttgacggcgtttatacctgcgacccgcgtcaggtgccggatgcgcgtttgctgaagtcgatgtcctatcaggaagcgatggagctctcctacttcggcgctaaagttttgcacccgcgtactatagcccccatcgcccagttccagatcccctgtttaatcaaaaataccggtaatccgcaggcgccgggtacgcttatcggcggcagcagcgatgaagacgatctgccggtgaaaggtatctctaatctcaacaatatggcgatgttcaacgtctccgggccggggatgaaggggatggttggcatggcggcgcgcgtgttcgccactatgtcccgcgcgggaatctccgttgttcttatcacccagtcctcttccgaatacagcatcagcttctgcgtgccgcagagcgattgcgctcgggcgaagcgggtaatggaagatgaattttatctggagctgaaagaggggctgcttgagccgctgtcgatcatggaacgtctggcgattatttcggttgtcggcgatggtatgcgcaccctgcgtgggatttccgctaaattcttcgctgcgctggcgcgcgccaatatcaacattgtggcgattgcccagggttcttccgagcgctctatctccgttgtcgtgagcaacgatgatgctaccaccggcgttcgcgtgacccaccagatgctgttcaataccgatcaggtgattgaagtgtttgtcattggcatcggcggcgtcggcggcgcgctgatcgaacagatcaagcgccagcagagctggttgaagagtaaacatatcgacctccgcgtttgcggggtggctaactcgcgcgccttgctgaccaacgtacacggcctgaaccttgaacactggcgcgatgagctggcggaagccaaagaggcgttcaacctgggacgacttattcgtctggtgaaagagtaccatctgctgaacccggtgattgtcgactgtacctccagccaggcggtggccgatcagtacgccgatttcctgcgcgaaggtttccacgtggtgacgccgaacaaaaaggccaatacctcatcgctggattactatcatcagctgcgtcatgccgcgagcagctcacgacgtaagtttttatacgatactaacgtcggcgcggggctgccggtaatcgaaaacctgcaaaatttgctgaacgccggtgatgagctgctgcgcttctccggtattctgtccggctcgctgtcatttatcttcggtaagctggacgaaggcgtaagcttctccgcggcgacgaagctggcgcgtgaaatgggctataccgaaccggatccgcgcgacgatctttccggcgtggatgtcgcgcgtaagctgctaatcctcgcgcgtgaaaccgggcgtgaactggagctgtctgacattatcgtagagccggcgctaccggcgggttttgacgccagcggcgatgtcgacagctttatggcacgcctgccttctctggatgacgagtttgcctcgcgggtctcaaaagcgcgcgatgaaggtaaggtcttgcgctatgtcggaaatatcgaagaggatggcacctgccgcgtgaaaatcgccgcggttgatggcaacgatccgctgtttaaagtgaaaaacggcgagaatgcgctggcgttctacagccactattaccagccgctgccgctggtgctgcgcggttatggtgcgggtaacgatgtgacggcagctggcgttttcgccgacctgctgcgtaccctgtcatggaagttaggagtttaagatggtcaaagtatatgccccggcttccagtgctaatatgagcgtcgggtttgacgtgctgggcgcggcggtaacgccggttgacggcacgctgctgggggacaatgtctcggttgaggcggcgacgagctttagcctgcaaaacgtgggtcgcttcgccagcaaactgccgacggcgccgcaggaaaatatcgtctatcaatgctgggagcgtttttgccaggagattggcaagacggtaccggtggcgatgaccctggaaaaaaacatgccgattggttccggcctgggctccagcgcctgttccgtcgtcgccgcgctggtcgcgatgaacgagttctgcggcaaaccgctcaatgagagccgaatgctggcgctgatgggcgagatggaagggcggatttccggcagtatccattacgataacgtcgcgccgtgctatctgggcgggatacaattgatgcttgaggaaaatggcatcatcagccagcagattccggccttcgacgagtggctgtgggtgctggcctatccgggtattaaggtctccaccgcggaagcgcgggcaattttgccggcgcagtatcgccgtcaggactgtattgcccacggtcgtcatctggcgggctttattcacgcctgctattcccgccagcctcagctggcggcgaaattgatgaaagatgtgattgccgaaccgtatcgtaccaaactactgccgggcttcagcgcagcgcgtcaggcagcaatggaaattggcgcgcaggcgtgcggcatttccggttccggtccaacgttgtttgcattatgcgataaaccggaaaccgcgcagcgcgtcgccgactggctggctacgcactatctgcaaaatcaggaaggcttcgttcatatttgccggctggacacggcgggcgctcgagtagtgggataaccaatgaaactctataacttaaaagatcataacgaacaggtcagctttgcgcaggccgtcacgcaggggcttggcaagcatcaggggctgttcttcccgcacgatctgccggaattcagcctgactgaaatcgacgagatgctgcagcaggactttgtgtcgcgtagcgcaaaaatcctgtcggcatttatcggcgatgagattccgcagggcgttctgcaagagcgcatcggcaatgcctttaccttcccggctccggtcagcaaagtgcaggacgacgtcggctgcctcgaactgttccacggcccgactctggcgtttaaagacttcggcggccgctttatggcgcagatgctcacccatatcgcaggcgacaaaccggtcactattctgacggccacctccggcgacaccggcgcggcggttgcgcacgcgttttatggcctgccaaacgtcaaagtggtcattctctatccgcgcggcaaaatcagcccgctgcaggaaaagctgttctgcaccctcggcggcaacattgaaactgtggcaatcgacggcgactttgacgcctgccaggcgctggttaaacaggcctttgatgatgaagagctgaaagctgcgctgggtcttaactcggctaactcaatcaatatcagccgcctgctggcgcagatttgctattactttgaagccgtggctcagctgcctcaggaagcccgtaaccagctggttatctcggtacccagcggtaactttggcgatctgaccgccggcctgctggccaaatctctgggtctgccaatcaaacgctttattgcggcgactaacgctaacgacaccgtgccgcgcttcctgcaggacggtaactggtcgccgaaagcaacccaggccacgctgtctaacgccatggacgtcagccagccgaacaactggccgcgcgtggaagagctgttccgtcgtaaaatctggcgcctgaacgagctgggctacgcggcggtggatgatgaaaccaccaaagagaccatgcgtgagctgaaggctatcggctatacctcagaaccgcatgcggcgattgcttatcgcgcgctgcgcgaccagctgcaggcgggcgagtacggcctgttcctcggcacggctcatccggcgaagtttaaagagagcgtggaagagattctgcaagagacgctgccgctgccgaaagagctggccgatcgcgccgatctgccgctgctgtcgcataatctgccggccgattttgccgcgctgcgtaagctgatgatgggctaagtctgaatcagcgcttccctgctgcgtgattggcggcagggaagcggtttttttactgctcgtggcgtttaaagaccagctctccgttgcccgaagcgtcggcgtcaaagaaataaccttcgctatcaaagcgggtcagctgctccggcttcgttaagcgattctcaatgatgtaacgactcatcaagccgcgcgcttttttagcgtagaagctgatcactttaaacttgccgtttttctcatcaaggaataccggcttaatcagctggccctcaagccgtttgggtttcaccgacctgaagtactcatcagaggccagatttaccacaatatcgtcgccctgggctttcaacgcctgattcagcttatcggtaataacgtctccccaatactgatacagatctttgcctttcgcgttctcaagcttaatccccatctccagacgatagggctgcatcagatccagcgggcgcagaacgccgtacaggccggaaagcatccgcagatgctgctgggcaaaatcgaaatcggcttcgctaaaggtctctgcccgcaggccggtatagacatcgcccttaaacgccaggattgcctgacgggcgttgtccggggtgaaatctggctgccagtcgtgaaagcgggtcgcgttcaggtcagccagcttgtcgctgatgcccatcagtttaccaatctgcggtgccgacagctgacgggcaatgccgataagctcctgagagtgttccagtagctctggctgggtataacgcgtcgttgccagcgggctttgataatcgagcgtttttgcaggtgaaatcagaatgagcatatccagtccttacaggaaatttttgacgactttagcaaaaaaacgtcatgagaggatcgatagctgcgattgccgcgctattcgcgcggcaggttgtcccatgttcccggtaccagctgctgatgaatttcagggtagcgggtgacgtcaaattccggccgctggcccagcttccgctgtcgcagataatcgctggcaatgatgcgcaccgtcggcgacagcagcaggatagccgtcaggttagttatcgccatcagcgccatgatgatatccgccatctgccagaccaccggtaggctgaccatcgcgccggtggcgaccatacacagcgtaagcagacgcagcagccagatgttacgcaggctatccatgcggagaaaaatgagattattttcggcatagatatagtttgcgacgatcgaactgaaggcgaacagcagcacgataaaagcgacaaagctggaaccccagtcgccgacgaggttgctcatcgaatgctggatggcctgaatgccatttgccgcttcttcgttgccgtctcgcggcgccagcatgatgatcacggcgctggcggtacagatcacgatggtatcaataaagacgccaatcatttgtacgatcccctgcgccgcgggatgagggggccaggaggcggcagcggcggcggaatttggcgtcgaacccatacccgcttcattggaaaacatcccgcgctgaaagccgctggtgagcgcctggctgatggtgtagcccaccgcgcccgcagcggcctcttgccagccgaaagcgcagcggaaaatgatttcaaaaatcgtcggcagggcggtgatatgccacaggccgataatcaggctggtcagcacccacagtaaagccataagcggcacgagccactgcatcagccgcgctacgccgcgaatcccgcgaacgatgaccagcagggtcagcgccgccagcacgacgccggtgataacatcgggtaaacgaaacgcatactccatggcatgggcaacggagttggcttgtacggtattaaagatgacgccgtaggccagcaggagaagaatggaaaacagcacgcccatccagcgcatgccgagtccccgggccatataccaggccgggccaccgcgaaagtgcccgcgggagtcgcgctctttataaagctgcgcgagagaacattcggcgaaactgctggccatgccgagcagcgccgagacccacatccagaaaacggcgccagggccacctgcggcaatggccagcgccacgcctgccatattgccgctgcccacgcgcgccgccaggctcatacagagcgcctgaaaagaggttaacccgccgggctgcggctgaaggctctttttcagacttctgctaaactggcggatataacggaactgtataaattttgttcgccaggtaaaccagacgccagcgcccagtaacagataaatcattaccgagccccagagtatttcattgataaacgacagaaaatcaggcatcaagcatcctcttgcccatatcggtgcgcgagtgtaagcgctaccaatccagtgacaatcctttagtgttcagggaattaattggcccagtttatcacactctgcgctcatgcattgtaggcggttgcgctgccccggcagcgtgttatcatcttggcagaccggttacatccccttaactgctgtttaagagaaacactatcatgacggataaattgacttctctgcgtcagtacaccactgtcgtagctgataccggagatatcgcggcaatgaagctgtatcagcctcaggacgccacgactaacccttctttgattctcggcgcggctcagatccctgagtaccgtaagctgattgatgacgccgttgcgtgggctcgcggccagagcagcgaccgcgcgcagcagattatcgatgcttccgataagctggcggtgaacattggtctcgaaattcttaagctgatccctggccgtatttccaccgaagttgatgctcgcctgtcctatgacaccgaggcttctatcgccaaagctaagcgcctcatcaaactgtacaacgatgctggcatcggcaacgatcgcattctgattaaactggcttctacctggcagggcattcgcgccgctgagcagctggaaaaagaaggcatcaactgtaacctgacgctgctgttctccttcgctcaggcgcgtgcctgtgcagaagcgggcgtattcctgatttctccgttcgttggccgtattctcgactggtacaaagccaacaccgataagaaagagtacgcgccggcagaagatccgggcgtggtgtccgtaagcgaaatctacgaatactacaaacagcacggttacgaaacggtggttatgggcgcaagcttccgtaacctcggcgagatcctcgaactggccggctgtgaccgcctgactatcgctcctgcgctgctgaaagagctggcggaaagcgaaggcgccatcgaacgcaaactggccttcagcggcgaagttaaagcgcgtccggcgcgtatcaccgaatctgaattcctgtggcagcacaaccaggatccgatggcggtagataaactggcggaaggtatccgcaagtttgcgatcgaccaggaaaaactggaaaaaatgatcggcgatctgctgtaataccccatgtggccggcgcccgtcggccacattaaactgtctgccttgctcccctcggtgtattattctgtctattaatactgtttgaacggaataatcatgaacaccttacgaatcggcttagtttccatttccgatcgcgcctccagcggcgtctatcaggataaaggcattcccgcgcttgaagcgtggctggcccgtgcgctctccacgcctttcgaattgcaaacccgcttgatcccggatgaacaggttattatcgagcaaaccctctgtgaactggtcgatgaaatgggctgccacctggtcctgacgaccggcggcacgggcccggcccgccgtgatgtcaccccggatgcgacgctggcgattgccgatcgggtgatgcccggctttggtgagcaaatgcgccaggtgagcctgcactttgtgccgacggccattctgtctcgtcaggttggcgttatccgcaagcaggcgctgatccttaacctgcccgggcagccaaaggcgattgaggaaacgctggaaggcgtgaaagatgcggaaggtaacgtgctggtgcacggcgttttcgcgagtgtaccgtattgtgtacagctgcttgaggggccttatgtggaaacaaacggcgaagtagtagcagctttccgtcctaaaagcgccaggcgtgaaacattatcctgaatttaccgtattcctgatataacctgcatcaccagtggtgtgttgttttatttacgatatagtgttttttactttacaccgtgcgtagaatatcttcatacctctggatgattgcccgttatgtcacactacacccgacctctgaatcgacaggattataaaacgctgacgctggccgccctcggcggcgcgctggagttttacgatttcattatctttgtcttcttcgccgccgttgtcggcgagctatttttcccggccgatattccggaatggctgcgccaggtgcagaccttcggcatttttgcggcgggctatttagctcgtcctcttggcggcatcattatggcccattttggcgatctggtcgggcgtaagaagatgtttaccctgagtattttactgatggcgctgcctacgctggcgattggcctgctgcccacctacgcgtcggtaggcatcgtggcgccgcttttgctgctgcttatgcgcattctgcaaggggcggcgattggcggtgaagtccccggcgcctgggtctttgtggcggagcatgtaccggaaaaaagaataggtatcgcctgcggtacgctgaccgctggcctgacggtggggatattgctggggtcggtcgtcgcgacgctgattaatactcatctgactcctcagggtatccacgatggcggctggcgtattccgttcctgttaggcggcgcgtttggtcttgtcgccatgtatctgcgccgttggctccaggagacgccgattttcctcgaaatgcagcagcgtaaagcattagcgcaggagctgccggttaaagccgtcgcgctgaagcatcagaaagcggtggtggtctcaatgctgctgacctggcttttatccgccggcgtggtggtggtgatcctgatgtcgccggtctggctgcaaaagcactacggttttgcccccgcaatcaccctgcaggcgaacagtattgccactatcatgctgtgtatcggctgcctgctggcagggctggccgctgaccgttttggcgccagccgcacgtttattgtcggcagcgtattcctcgcggcggcaagctgggcgttctatcatctttccggcgatagcccgcagcgcctgttcctgctttacggcgcggtggggctgtgcgtcggcgtggtcggggcggttccgtatgtgatggtgcgcgcgttcccggctgaagtgcgttttaccggtatctcattctcttataacgtctcttacgccatctttggcggtctgacgccgattgcggtgaccatgctgatgggcgtttcgccgatggcgcccgcgtggtacgtgctggcactgtcgttgatgggattggggctggggatctggctgcgccaggggctggaacaacaggtcgctgcgccgaaagctgaactgcagcgcctgccgtaaatcgatagggctcacgtcgccgctcgcgaacgggcggcgacgttaattaatgcttttcgccgattggcagaacggtgcggccaaactgctcgttcagcacttcacccatcgccagatagatggcgctagcgccacagaccagaccgacccagcccgcaatcttaacgatgccttcgttatcagccaggtgaccaatcgccagcagcgcgaacagcacggtcagactgaggaaaacaaactgcagcatacgcgcggctttcagggtgccaaagaacataaacagggtaaaaacgccccatagtcccaggtacataccgaggaagtgcgcgttgggtgcttctgcaaggcccattttcggcatcagaagaatggcaaccagcgtcagccaaaaagcgccgtaagacgtaaatgcggttaagccaaaagtgttgccttttttaaattccagcaggccggcaaaaatctgcgcaatgccgccgtaaaaaatgcccatcgccaggatagctacatcaaacgcgaacaggccgctatttgccaggttaagcagaatagtggtcatgccgaagcccataaggcccagcggtgccggattagccaacttagtgttgcccataattcctcaaaataatgattagaaagggaagcattccccgcctctcagcgacggggcgcggcataataattaggtgctgcgaaactgtctatgatctggcggggtatttttcaccaatttcatttttcacctgatgaagtctggtcatttgccgtaaacaggcaatatgcagtacggccgggatggtcacgcgataagcgctgccgctcacggctttgacgccattaaacgcggcgccgagggggccgccaagccccgcgccgcgaaccagaccgtggccgatgacgctaaccgcggcgtgcgtgcgcaggatcttcgccagccggatttccagaaggtgggtgacgccctgcgccagcttatttgtctgcagcagatggggaagtaacgctttatgctcgttgacccggcactcaacggcagtgaagaagtcagctttctgccgatcgtccatcttcttccagctgtgttccaggaagtgctccagaagatgcagttctatttccggcgtagaggtgtgcttatcggctttgatttttagccgcttgcagacatccagcaaaatttcccggtagaactttccgtgacgacgcagcgtgttggcgatgctgtcgccgccaaagtgctggagctcgccggcaatgagctgccagttgcgacgatagcgttcgggatgccctgccatcgcctggaaagtttgattacgcaatagcgtgcttgaaagacgcggctttccattctcattgtgagtcagaattcgggtgaatgcttccagatgctcttcgctacagcgatgaagaaaagagaggtcttcatcatccagataattaattttcataaataccagataaggtgaacagtgatattaatcgtcgccaatgatttttagcgaggccatgtcggaagagttaatcgtgtggccagaaaaagcgattttttttacgcagcgcttgttatcgttgtcgctattaatgttaatccagtcggtggttgccccctgtttgatggttgacggaacgttgaggctctggctggcgctattgctggctttaaagtacaccgtcgcgcctgacagctggacatcgccgcgatcggcagtgagctggatacgcttaatcacccggcataccggtagcttcagcgtgagatcgttagtctcatttcgcggcatggcgacaatccctaaaattttatgatcgttagcggatgctgacgttattaaggcggcgcttaaaaataaccctgctgatatatgaatcagtgatttcatgaggatttcctgaatattggatgtgtcatagcgggggcgtattttatcaccggagctttattgtctttagcacgtaatcattgcggattatgtcaattgttttatgaatatatttaactttaattattattgttaattatgttttgtgcgtttttaggcccgctttccggaccgcttatgaggcctgctcgccacccgacggcgcgggcagggcaaaaatttttttgtatccccccttgatgccgcggtgggcgaccccatcttgtagtcaaccgcagtgaatgaacctgaaaaaaaatgatgtctgggtagttgaaaccgcacgtttcgcccttattacaggttcacaaccacatgttgactgaatttttagtggagacgtttagatgggtaaaattattggtatcgacttgggtactaccaactcttgtgtagcgattatggatggcactactgcacgcgtgctggagaacgccgaaggcgatcgcaccacgccttctatcattgcctatacccaggatggtgaaactctggttggtcagccggctaaacgtcaggcagtgacaaacccgcaaaataccctgtttgcgattaaacgcctgattggccgccgcttccaggacgaagaagtccagcgtgacgtttctatcatgccgtacaaaatcgttgccgcagacaatggcgacgcatggcttgatgtgaaaggcaccaaaaccgcaccgccgcagatctctgccgaagtgctgaagaaaatgaagaaaacggctgaagattacctgggtgaaccggtaactgaagcggttatcaccgtacctgcttactttaacgatgctcagcgtcaggcaaccaaagacgccggccgtattgcaggtctggaagtcaaacgtatcatcaacgaaccgactgccgctgcgctggcttacggtctggataaagaagtcggcaaccgcactatcgcggtgtacgacctcggtggtggtaccttcgatatctccattatcgaaatcgacgaagttgacggcgaaaaaaccttcgaagttctggcgaccaacggtgatacccacctgggcggtgaagacttcgatacccgtctgatcaactacctcgttgacgagtttaagaaagatcagggcattgacctgcgtaacgacccgctggcgatgcagcgcctgaaagaagccgctgagaaagcgaagattgaactctcttccgctcagcagaccgacgtgaatctgccgtacatcaccgcagatgccaccggtccgaaacatatgaacatcaaagtgacccgtgcgaaactggaaagcctggtagaagatctggttaaccgttccatcgagccgctgaaagttgctctgcaggatgctggcctgtccgtatccgatatccaggacgttatcctggtcggcggtcagactcgtatgccgatggtgcagaaaaaagttgctgagttcttcggtaaagagccgcgtaaagacgttaacccggacgaagccgttgccattggcgctgctgttcagggcggcgtcctgacgggtgaagtgaaagacgttctgctgctggacgttaccccgctgtctctgggtatcgaaaccatgggcggcgtgatgactgcgctgatcaataagaacaccaccattccgaccaagcacagccaggtgttctcaaccgctgaagacaaccagtctgcggtaaccatccatgttattcagggtgagcgtaaacgcgcatcggataacaaatctctgggtcagttcaacctggatggtatcaacccggcaccgcgcggtatgcctcagatcgaagtgactttcgacatcgatgctgacggtatcctgcatgtgtccgcgaaagacaaaaacagcggtaaagagcagaagatcaccatcaaagcctcttctggtctgaacgaagaagaaattcagaaaatggtacgcgatgctgaagctaacgcagaagctgaccgtaagtttgaagaactggtacagacccgtaaccagggtgaccacctgctgcacagcacgcgtaagcaggttgaggaagcaggcgataaactgccggctgacgataaaaccgctatcgagtctgcgctgactgcgctggaaacttcgctgaaaggtgaagataaagccgatattgaagcgaaaatgcaggcgctggcccaggcttcccagaagctgatggaaatcgctcagcagcagcacgctcagcagcaggctggcggcgctgacgcttccgagagcaacgcgaaggacgacgatgttgttgacgctgagttcgaagaagtgaaagacaaaaaataatcgccctttgaacgggtaaaacactggcacgggcgaagaggtttcctctccgcccgtgcacgcatgttaaggggctgaaaaacaccaatggcaaagcaagactattacgagattttaggcgtttccagaacagcggaagagcgtgaaatcaaaaaggcgtataagcgcctggccatgaagtatcacccggaccgtaaccagggtgataaagaggctgaagctaaattcaaagaaatcaaagaagcgtatgaaatcctgaccgatgcccagaagcgtgcagcctacgatcagtacggtcacgccgcgtttgagcagggcggcatgggcggcggcagcggtggttttggcggcggcgcggatttcagcgatatctttggcgatgttttcggcgatatttttggcggcggacgcggtcgccagcgcgcagcgcgcggctcggacctgcgctataacatggatctgacgctcgaagaagccgttcgcggcgtaaccaaagagatccgtatcccgactctggaagagtgcgacgtttgtcacggcagcggagccaaagcgggtagccagccgcagacttgcccaacctgtcacggtgcgggccaggtccagatgcgccagggtttcttcgccgttcagcagacctgtccgcattgccaggggcgcggtacgctgattaaagatccgtgcaataaatgccacggtcatggtcgcgttgagaaaaccaaaacgctgtcggttaaaatcccggcgggcgtcgataccggcgaccgtattcgtctggcaggcgaaggtgaagcgggcgagcatggcgcaccggctggcgatctgtatgtacaggttcaggttaagcagcacgccatattcgagcgtgaaggaaataatctgtactgcgaagtcccgattaacttcaccatggccgctctcggcggagaaattgaggttccgacgctggacggtcgtgtaaatcttaaagtgccgggcgagacgcagacaggtaagctgttccggatgcgcggtaaaggcgtgaagtccgtgcgcggcggtgcgcagggcgatctgctgtgccgcgtggtggttgaaacaccggttggccttaacgataaacaaaagcagctgctgaaagatcttcaggagagctttggtgggccaacgggtgagaagaacagtccgcgctctaaaagtttcttcgatggcgtgaagaagtttttcgatgatttgacgcgctaattgctattcatttcctgactttcttcaagcctgggccttcgtgcccaggcttttttctatcaggcttctacactatttaaattaacctattatttatcagggctaacaattgatttattttgagtattatctatattgcttttttcatttttagaggcctacagcggatgggatcgaaaggtgccaataaggattttgattataatttaatcaagactcttgacgctgttatttcggctggaaatgctgctaaagcagccaaaaaacttggaattaccccttctgccgtgtcattggcgctccgccgtttacaagggtattatcaggaagagttgtttgttcgtggtaaggatggtctgttacctaccgcgaaggcgattgaaatctatcaaaatttccgtcaggtgatggaattggtagagagcacatttatttccgacaaaaaagataacgctgacgccaggatgactattttaggcggagatatcgttgagacttactacctctctcagctttatgcagacgatatctttgagcgcgtgttacttaatcattattcatcacgaaacctttcccgcgaggtgctggctgatttactactcactgcggaatgcgatcttctgattagcagcgagccgttgaatatcccgggaattgataatcagcttatcgacagcttcaggagctttgtttgcattttcgccagcaaccatatcctgagtaccttacctcatatctcattacatcatttctattcttctcgtcacgcgatgtatcaactgggtaggtattcaccgatgattataaatgataaaggcctttttaaagataatttttattataaaggatcgcgcattatcggctatcgcagcgattcactcaatgggatgttaagtatgattgaacgcacctcattaatcgcattaatgccgttaaagctggcacttttttataaaaatcagcgcaaatatgatattaagtttgttcagccgccacctgaacttacgttcaaatctatacagatttatgcatcatgggacaaaaatagtaaaaatatatccatcattaacgaagttgtctcccggttacacacgctgtcatcatttcgtcgctgaggagtatcttttcaaacactatatcaaatatggtttggtttgatactctttgattattttaaaatagtcaacctacctacactctggtggtgcctttttatatgagttaatcaaggagtgtactatgtctattcccaaccatctcgaaaccacggaagtcgttttgctggaagtcgaaatattgttcaccattattgctaccggcgcctgggggggatttgttagctatcttatccgccgtgataggcaagagggtgacgatcattcccataagggaatcatgcactgtttgacccaggtggtggtttcctgttttaccagttttttgctcagcgctgtagcgattgaaaaagagcttagttttaatatggtgctactcgccgccggtcttggcggagtattcgcagggccgattttaaaaattcttggcgagaaaattaaaaaagcgctggatgacgcaaaaatacattaactacatatttaatgtatatcgttcatgataaaaggctcatccctgagtcttttattagctataattaaataatcgtgttatttgactctggctttcatccagccaaaaatgaactcttcattttgtctatttttttcagtgatatccaggtagtaggcgccctggctacagttgagcgctttgactaatacctcctccccctgcttaccccgtaaggtcagaaaatgcttgagggccgcgagcgttcgggggccaatcttgccatcggttttgatatcctggtagcttctttcttcccgatttagtgcatttagccagcgctgtagccacacgcagggatagtgggggccaatattgactgcggcatcgcagagttcaaaggaaatgggccaggagagtgttgatatctgctcgaagccgggtttaatccaataatcttcttcgagaatagaaaatgcttcagttcgcgtcaggttgatcatctcaccggtataaccatgggcccgggctgtcgcctcagtgattccccagttggttgcaccacctttatctttcgggttcaggctgtaaccaccttccatcgccaaaatgccatcaatgattgggttcattttttctctccttgaattaatgaatatgcaaatacatcactgtaccgagggtgacagaaaagaccgtggttaatgctgccagcgtctttctgaaaacctgtcgtttgttttctttcttcttgctttccattgctttaatagggatctctttattaacttgaatgccttgtcttgggatggtgataaagagatcgtttattccaagcgacttcagatctcgtctgatcaggtagagtatttgcgttaaatttgcatcattgacaaaatggctacgacttccccataactctgtggttattttttggcgctcaataatatccatatcagcattttcgatgatgaagctaagacacttcgccctcattgccgtcattttaatgacctttgagttggaagcggttctcagttcatactttccttcattataaacgcaattgtcgttgatgagataagttttcatattgtcgtcctttagatatgatcctgtttgcttgcgttaaatatattgtacgagaattgtcttaatctattacttgtcatccgtattattgtaatgtcatttgatggtgagagcttaatcacataatctcatgtaagttaaatgatatttaactaggtgattaatgatatttactatgctgctgatgttttaatcccgttttgatgagatgcgtttacctgctgatgagccggagattattactatcattttagcctcataaattagcgtgaagtctgtatcgaaaacgtgatgttttgtgattagccatcgcctcgtaaggattggattattggcccggcagaacgaactgcgacaatttttcaaacttaaaaggaaattaaaaatggctaccagcaaattgattcaaggcgatacgctgaccgaaaccagcaacgccgctgacggctttaaccctgcaacagaagtgagcgcatacagctatacctccgctcgcgtcgctaaaccggtctataacaaatacaaagcctccaccactaaacccaaagtcttcggctactacaccgactggtcacagtatgatggtcgtctgcagggcgatgattcaaaagataaccgcggtcgcggctacgacctggccaacgtttctcctaccgcctacgacaaaatcatcgtcggtttcgtcggcgtgaccggcttccacaaagtagacaacctgtggcgcgacgtggttgccgaaggtgccgatcagtgcggaaaagtgaagtacgagcccaccttcctcgacccgtggggcgacttccagtcttacgttaacgttggccataccgtcagcggctgggatgtcgatccgaagaccgtgacccagagtaatactaagggcctgctcggcggcctgcgcgatctgcaggccaaagcgaagcagcagggccacgacctggtgctgtccatgagcatcggcggctggagtatgagtaacggtttccatgaaaccgccgcgtctgacgccgcgcgtaaggtctttgccaaaggcgtggtaaaactgttcaagcagttcccgatgttcagcgaagtggacattgactgggaatatccgaatgccgaaggcgctggcaacccgtacggcccggaagacggcgagaactacgccctgctgattggcgaactgcgtaagcagctggacgccgcaggcctgagcaacgtcaaaatctccattgccagctcggcggtggtcaagacgctcggctactccaacgtcaatgcgctgctggaagcgggcctgtacggtatcaacgtcatgacctatgacttcttcggtaccccgtgggcggagagcgtgacccaccacaccaacctgaaggcgctggaagaaggcggctggggggtggataccgttgtcggccatctgctgtccgaaggcttcccggcagagcgcatcaacattggttacgctgcctacacccgtaacgggcgcaacgcggagctggaatccctgtccccgctgaaaggcacctataacccgggcaccggcaccaccgtcggctccttcgaatcgggtaccaccgaatggtacgacatcatttataactacctggatctggaaaaccagaaaggccgtaacggcttcaacgtctacaccgacaaggttgccgacgcggactacctctacaaccctgacagcaaactgttcatgtccctggatacgccgcgcacggtgaaagccaagggtgaatacgccgccagcctcggcctgggcgcgctgttcacctggacaatcgaccaggacaacggcgtgctggttaacgccgcccgtgaaggtctgggctatgaaatggcgtctgaagttatcgatatggagccgttctatttcgaaggcatcaacgtcgacccggcggatgaaccggatgaagaagatgcgactaccgacgtgaaccacgcgccgaaagccgccgttgaactgcgcgtcgtcggcggctctaccgtacagctttccggtgaaggatcctctgacgaagataaagacgatatcaccttcagctggggtgttccgtctgaaatcaccgtggctgacaaaaccgttcccgtgatcgagttcgtcgttccggacgtttccgttaaaaccaacttccagttcaccctgtttgtccgggatgtctggggcgagccttctacccagcagcgtttcgtgctggtcgccgttccggctgcgtctcagattcaacctgagccggaagaggaagatagcgttgtgcccgtagagccggaagaagataccacgccggcagaagatgagacttcgggggatgacgcgactacgccttatccgctgtgggatgccgcaaccgtgtacggtgggaactgggggtcattcgaaacggtaagctggaaaggccataactaccaggtgaaatggtggtctcagggcgatcagccggacctgaactgcgctgcgggccaggcatggactgaccttggtgcttactaatccttttcattaaaggaaaaggattgagttcaacaatacaagccccggaaaaccggggctttttccaccagggaacgaggagtgttgtcaatgacggtctcgattaaaaacagccagatcgatgtgaatagctggtatcagaaaatcacgttaaccatcaccaatgaaaataaccgtgccgtggatatgaatcatgcggtcattagctttaccgggtccggccatcaggatccgtggggaaattttggcggtaccctcaaaggggacatgcctcttacgttaagcggtaaatcacaggggaccgttgacgtcaatgaaatcattattaataacagccggcagctgttactgcagccgggcgaaagcggtacgttattcttcagttttgccgccactcaggttccggtaaaactctcgaccttcacattaacgctggcctcttcggcacaagacgagacaacggatgacgctgcagatgaggttgagcccgaacctgaagttcccgccgatgatgatactgatagcctgaagcccgaacctgaagacaatatccctgctgatgaggaaacggatgaggttgctccggaacctcaagagcagggtgatgatgcggttgaggaagaggaagggatagttattgcggcaagccagctgagtacaaccagctggtatcagcgcgtcaccctgacgctgaccaatctctattcccactctatcgatcttaatcaacttaagctggagtttaccgccagcgggcatcccgatccttacagcccgttcagcggttctttgctcggcaataagcccgtgacgctgggcagcgacggcggttggcccatcgagaaaaatacgattaccattcatcatgatggcgagttctggctgacggccggggccagcgccgagctgcagttctttctttccgctacccaaactccggtcacgatgagcggcttaaccgcaaccctggcgcacgatcctggccgtcaggggacgattgaaattgagtttccaccgttggcggaaagcacaaccctcaagccgaccatcgatctgcgctatccagacgcaacatcacaacgctttgccggcgagtggggacaggctttagtcatcggcgatcttagcgccggcgattacgctatcaccgtgctggagctgtgcaatgatgatatgcggatcgcgcccgttgaatcgacgtattcgcttaagcttgtttccggtcatgacgcccaaacctgccgggttgcgtatcaatcgccagtaccgttggcttcggtacgcctgactgtcgatgcccctgagttcatcggcgcggaaatggtggttgagctgtggacggaatctggcgtctgcgaaagaaccctgacaatgcccgtcaatcaaatgcagctggtgacccggcttaccgcggggcaccgctatcagatgggtttgcaacctgcggttatcaataaccagatggtgacgactcccgccctgccgactatttttacccctgaacaaggggtggcgaaagaggtgctcgtcggcttccggcagacggaggttgatagccatgattttgttgaggttcaggccactatactgggcttgcctgagggcgtttcgccccagcgctatcggttctgctatgggcaatatcaatatactctgatgctggagagcactccccatctgcaaacgctggcgatgcctatggctcctggccagtacagcgttgaggcgccagaggtttatctctccgggacgccgtggcgctgtgaaccggacgcgccgctgcggctgttgcaaagcgtcaaccatatcaccctggagtttgttcagggcgttcccttgcaggttaaaggctggccaaactatctcgcccacggtggcgtgacggtgaatgcggcggacaccgtatcgctataccgcgacgtcccctttagcgccctgtttaaatacgatggttttgatggcggcggtgaccctgtcccggctgcggaagtggataaaaacggcgacggctttcttgattatgattcgctcccgattcacaaaaccgttcctctggtacgtgagattgaaaaagaggcgggccgttgcgtaatgccggtcatggtggtgtataccgccaatgccagcggcggcagcgcgctcgccgatctccaggacgctcagcggttgcgtaaccattttggcaacttcatcacccagtgtctcgcggcgcaatcctggaaggatgacgagcatccggttcccgccacctttgtgctgaaccccgattttcttggcgcgatgcagcaggagccgtatggctacgctgcggtgcgtcaagcgaatagcatgcaggttaatgtccaactggcggccgcgattaacgctttgcctgcgcttccgggattcagcgcgccggtgttgccgacgttctctaacgatctctacggttatgtccaggcgatcaactacattgtgcggcagttcgcgccggatgtggcattcggctggcagacaaacgtatgggcgacgggaacggcagattgggtactcaggccgaacgccgatccggccgcgcaggggaccgctatcgccaactttatcaatgagctgggtgtctatagcggtgagtatgcgccagactttatcgcttttgataaatttgagcgcgattgctttagccctgatgcattagcgcactatgcctggaacgcgacctgctggtttaattatctggggatggtaaaacacgcggctaaagcgctgcgtaaaccggcaatgctgtggcaaattccgggcggccatatgccaaccgtggatgaaggcagcagtaaaattgccgccgcgcattacgcatcgggcggaagcttctttatgggcgatgcgcgtattggctgcgatctcgataccatcgcgtcagatctgctcaatacggcggtgaatagcgcaacttacggcgcggcgaccgtcggtgactttttacgccaggataagggttacgactgggggcaaatgcaggcattgaatctacccgactaccatgttttctcagtactgtggggcggcggctcgacggtaagcataaccaccattcactctaatggtgaagatggcggttggcttgcagataaaatggttgagtattataccgcaccggcctatttcagttaatgtcacatttaccccgccatagcgcctgaaaaatgcatcgctgttcatagtgattcagaatatttaatttctgaatcactatttttagtgtatttttatttcgtgagagatagtttcagcagttattttattgttatgttaattttttgttttgcgatttatttgtggttgttgaagtttatattaagaatttgcgctttgtgctaagtattgcgttttcgtgcttgcggctaaaaatatacttccgggaggatgtttataatgaattgaagataacctccgttaagtatatcttggggtaatctatgattatggtaataatgaaaaatgaaattagacgttgctgaaaatgataatgggaacaccctgcattcctatcttttttcccaacaggctaaaccgcatgcagcgcttgatgcactcttcgcctcgctatggtccttcggtaaaccttttaatttggctcccggagatgagtttttactgaattcagacggggaaaataaaattgtgctgctggagtcaggtatattttccttttgccgctgtggcagcggacttcatgttaattcctcttttgctcccgccattatcggattagtcgatagttatggggtgacttacaattttccgacccggccagaacactttctgatagcggaaacgaagtgcagcggacgcgcagtgtctctgcccgactttatcaagactgttgatgagtgcgatctgtggcacgatgtcgcacgaatacttgcctatcgtctgatggtcatgagcgtacgcgatcgtgaattggtcggtgtggattcttatctgaaggtgagatcgttattaatcgagctttgggcttatgccagcgaatatcgacaaagtattaatgtgcttaacttcattcaacgccgaacaggaatttcccgtagccgtaccatgaagcttctctctgaactgaaaaaaggcggctatataactattgatggcggccgtttaatagatatgaaaaaattacccacggctttttaatacttttcagggcaaaggtgtttattagtattagtagtcaccttttaaactttcttggtacggaaattgtcgagatattcatatattgattatcctgtcaatcatgctaatgacgtaaagagagatttcccattggtataatttttaaatatcttatgggacataaaaaagtcgacgatcgcggcaaccgctcatgcatcatcccattcacgctaagctaatacgcataaccatgaagatggcgatacggattctttccttatggccgttgaggatggggctggcgtacctctgacttcctgttcggacaacgcagcgtcacccattgacgagcggacggccaatctcttaatgagggttaattcgtaaaaaacgaatgtaatggcaatttaaaactgattttttcgaggtttccgcatatgtactatgcttttatcgagttgtttgcggatatggtgaggtaaaagtgaaacatctgcagcgtttttttcagagcgatgcttccgggggcattatcttaatcctggccgctatcatggccatgttattagccaataccggcatgaccagcggcctgtatcgctcttttctggaaacgcccgtccagctgcgcatcggtgcgttagagatcaacaagaacatgctgttgtggattaacgacgcgctgatggcggtatttttcctgcttatcggtctggaagtgaagcgtgaaatgaatcagggggcattggccagccgtcgccaggcggtgtttccggtggtcgcggcgttgggcggaatggtggttccggcgctggtctacctggcgtttaacggccaggatgcgattgccagagaagggtgggcaattccggccgccaccgatattgccttcgcgctgggcgtgctggcgctgctggggaatcgggtgcccgccgcgctgaagattttcctgatggcgctggccattatcgacgatctgggcgccattattattattgcgctgttctatacgcacgatctttccgtcgtctcattggttgtcgctgccggagccattgctgtgctggcggggttaaatctgtgcggcgtacggcgtaccgggatctatattctggtgggcgccatactctggaccgcggttcttaagtcgggggttcacgcaacgctggccggggtcattgtcggctttatgatcccgctaaaagagcagaacggcaaatcgccggcgaagcagcttgagcacgtgctgcatccgtgggtggcattcctgatcctgcccctgttcgccttcgctaacgcgggcgtttctttgcagggcgtcacggtagaagggctgacctcactgctgccgttgggtattattgccgggctgtttatcggtaagccgttgggtattagcgtcttctgctggctggcgctgaagctgaaatgggcttcgttacccgaaggaaccacctgtaagcaaattatggcggtcggcatcctgtgtgggattggcttcacaatgtcgatttttattgccaccctggccttcggtagcgtcgaccccggattgatcaactgggccaagcttggcatcctgattggatcgatattatcggccgtcacgggatacataatattgcgtaagcgcgtaacggattcgggctacgcggcttaacatctcacggagagccgctacggctctcctggacattatcagggagagaagcatgtcgcatatcaactacaaccacctgtactacttctggcatgtctacaaagagggctccgttgttggcgcggcggaagcgctgttcctgacgccgcagaccattaccgggcaaattaaggcgctggaagaacgcctgcaggggaaattgttcaagcgtaaaggaagggggctggagcctagcgaattaggtgaattggtgttccgctatgcggatcgcatgtttacgctgagccaggaaatgctcgacatcgttaactaccgtaaagagtcgaatctgctgtttgatgttggcgttgcggatgcgctgtcgaaaaggttggtgagcggcgtactggatgccgccgtcgtcgagaatgaacagatccatttacgctgcttcgagtcgacccacgaaatgctgctggagcagctaagccagcataaactcgatatgattatctccgactgccccatcgattccacccagcaggaagggctgttttcggtgaaaatcggcgagtgcagcgtgagcttctggtgcatgaatccgccgccggaaaaaccgttccccggctgtctggaagaacgccgtttgctgatccccggccgccgttctatgttagggcgcaagctgctgaactggtttaactcgcagggtttgcaggtggagattctgggcgagtttgatgatgcggcgttgatgaaggccttcggcgcggcgcacaatgcgatatttgtcgcgccgacgctctatgcgcatgatttctatagcgatgagtcgatagtcgagatcggacgcatggacaacgtcatggaggagtatcacgccatctttgccgaacgaatgatccagcatccagcggtgcagcgtatttgtcatcgcgactattcggcgctctttacgccgcctcaggcataggccagaacggtttcttgccgcgcggaaaataccccaccagttcatgcggaagcatgagctggctgcgataaccagaacgcgagtcgtgacgtattacgtgataaacgacaggcataaaaaaaacccgctttcgcgggtttttttacaaagcgacaacaagcaggcgattaagccagtttgttgatctgagcggtcaggtttgctttatgacgcgcagctttgtttttgtggatcagacctttagcagcctgacggtccacgattggttgcatttcgttaaatgctttcagtgcagtagctttgtcgccagcttcaatagctgcgtatactttcttgatgaaagtacgcatcatagagcgacggctagcgttgtgcttgcgggccttttcagactgaacggcgcgcttcttagctgatttgatattagccaaggtccaactcccaaatgtgttctatatggacaattcaaaggccgaggagaatgcccgtttagccttcttttgtcaatggatttgtgcaaataagcgtcgtttaaaccaacaacgctttattacgtagtgatggcgcaagattctaccagcttgttgcaggcgaatacagcctttcgaccataaaaatcgacgacgctggagagattttcccgcaatctcgcgctgagtgaatgaattcccgggatctttcggtgaagaggtgcaatcgctggttaacgtcgccagttgtacaaggtatactcggacgattttcactgttttgagccagacatgaagctgatacgcggcatacataatctcagtcaggccccgcacgggtgcgtgctgaccattggaaattttgacggcgtgcatcgcgggcaccaggcattattgcagcgtttgcgcgcagaaggtcgccagcgtggcttaccggtggtggtgatgatttttgaaccacagccgcttgagctttttgccgccgataaagcgcccgcgcgtttaacgcgcctgcgtgagaagctgaattatctggccgaaagcggcgtcgattacgtactgtgcgtgcgcttcgatcggcgctttgcggcattgaccgcccaggactttatcagcgaactgctggtgcgccagctgggcgtccagttcctcgccgttggcgatgatttccgctttggcgccggtcgccagggggatttcttgttactgcaaaaagccggcgtggagttcggctttgacgtcaccagcactcaaaccttctgtgaaggcggcgtgcgcatcagcagcacggcggtacgccaggcgctggcggacgacgatctgcccctcgcggagacgctgctggggcatccgtttaccatctccggtcgcgtcgtgcacggcgatgagctcgggcgcacaataggcttcccgacggcgaatttaccgctgcgccgtcaggtttccccggtaaaaggggtctatgcggtagaagtgacagggcttggcgacaaaccttttatgggcgtcgccaacattggtactcgtccaacggtctccggcgtgcgtcagcagctggaagttcatctcctggatgttgtaatggacctctacggtcgccatatagatgtaatactgcgtaaaaaaatacgtaatgagcagcgatttgcgtcgcttgatgagctgaaaacgcaaatcgcacgtgatgagttaacggcccgcgacttctttgggctaaccggccaggcataaccctgacggtgtttatcaaaccgaaatacggaaccgagaatctgatgagtgactataaatcgaccctgaatttgccggaaacagggttcccgatgcgcggcgacctcgccaagcgtgaaccgggaatgctggcgcgttggaccgatgatgacctgtacggcatcattcgtgcagccaaaaaaggcaaaaaaaccttcattctgcatgatggccctccttatgcgaatggcagcattcatattggtcactcggttaacaagattctgaaagacattatcgttaagtccaaagggctggcgggctatgactctccgtacgtaccgggctgggactgccacggtctgccgatcgagctgaaagtggagcaagagtacggtaagccgggtgagaaattcaccgccgccgagttccgcgctaagtgccgcgaatacgccgccacccaggttgacggacagcgtaaagactttatccgtctgggcgtgctgggcgactggtcgcacccgtacctgaccatggacttcaaaaccgaagccaacatcatccgcgcgctgggtaaaatcatcggcaacggccatctgcacaaaggcgctaagccggtgcactggtgcgtagactgccgttccgcgctggcggaagcggaagtcgagtattacgacaaaacctctccgtccatcgacgtggcgttccacgcggccgataaagcggcggtgctggcgaaatttggcgtggccgacgtcaacggcccggtttctctggttatctggaccaccaccccgtggaccctgccggcgaaccgcgccatctcgctctccccggagtttgactatgcgctggtgcaggttgacggtcaggcgctgattctggcaaaagacctggtcgacagcgtgatgaagcgcgccggcattgctgattacaccatcctggcggtggtgaacggcgccgagctggaactgatgcgctttaagcatccgttcctcgattttgacgtcccggcgatcctgggcgatcacgtcacgctggacgcgggtaccggtgcggtgcataccgcgccaggccacggtccggatgactatgtcatcggtcaaaaatatggccttgaagtggcgaacccggttggcccggacggcgcctatctgccgggaacctacccaacgctggacggcgtaaacgtctttaaagccaacgatgttgtcgttgcgcttctgtcagaaaaaggcgcgctgctgcacgttgaaaaaatgcagcacagctacccgtgctgctggcgtcacaaaacgccgatcatcttccgcgccacgccgcagtggttcgtgagcatggatcaaaaaggcctgcgcaaacagtcgctttccgaaatcaaaggcgtgcagtggatccctgactggggccaggcgcgtatcgaatcgatggtcgccaaccgtcctgactggtgtatctcccgtcagcgcacctggggcgtaccgatgtcgctgttcgtgcataaagagacgcaggagctgcatccgcgcacgctggaactgatggaagaagtggcgaaacgcgtagaagtcgacggcatccaggcgtggtgggatctcgattcccgcgacatcctcggcgccgacgcggatagctacgagaaggtgccggatacgctggacgtctggtttgactccgggtcgacccactcttccgtcgttgacgtgcgtccggagttcgccggtcacgccgccgatatgtatctggaaggctccgaccagcaccgcggctggtttatgtcatccctgatgatctctaccgcgatgaagggcaaagcgccttaccgccaggtactgacccacggctttaccgttgatggccagggccgcaagatgtccaagtctatcggcaataccgtttctccgcaggacgtgatgaacaagctgggcgcggatattctgcgcctgtgggtggcttccaccgactacaccggcgaaatggcggtctctgacgagatcctcaaacgcgccgctgacagctatcgtcgtatccgtaacaccgcgcgcttcctgctggcgaacctcaacggtttcgatccggcaaaagatatggtgaaaccggaagagatggtcgtgctggaccgctgggcagtaggctgcgcgcaagcggctcaggacgatatcgtcaaagcctacgaatcctacgacttccacgaagtggtgcagcgcctgatgcgcttctgctccatcgaaatgggctcgttctggctcgatatcattaaagatcgccagtacaccaccaaggctgacagcatcgcgcgtcgtagctgccagaccgcgctgtaccatattgccgaggcgctggtgcgctggatggcgccgatcatgtccttcaccgctgacgaaatctggggttacctgccgggcgaccgcgagaaatacgtctttaccggcgaatggtataccggcctgtttggcctggacgctgacgaagcgatgaacgacggcttctgggacgcgttgctgaaggtgcgtggcgaagtcaacaaggttatcgagcaggctcgtacggacaagcaggtgggcggctctctggaagcggcggtaacgctgtacgccgatgccgatctcgcggcgaagctgaacgcgctgggcgatgaattgcgatttgtcctgttgacctcaggggcgaacgttgccgattatgcgcaggctccggccgacgcctggcagagtgaactgctcaaaggtctgaaagtcgtgctgagtaaagccgaaggtgacaagtgcccgcgctgctggcattacaccacggatatcggcaaggtggcggaacacgcggatatctgcggacgctgtgtcagcaacatcgccggtgacggcgaaaaacgtaagtttgcctgatgagtaaaccgatttgttcaacggggttacgctggctgtgggtcgtcgtagccgtgctgattatcgatttaggcagtaaattcctgatcctccagaacttcgctctgggggatacggtatcgctgttcccatcgcttaatctgcactatgcgcgcaactatggcgcggcttttagcttcctcgccgacagcggcggctggcagcgctggttcttcgccggtatcgctatcggtatctgcgtgatccttgcggtgctgatgtatcgttctaaggcgacgcaaaagctgaataatattgcctacgccctgattattggcggcgcgctggggaatttattcgacaggctgtggcatggttttgtcgtcgatatgatcgatttctacgtcgggaactggcacttcgccaccttcaacctcgccgataccgctatctgcatcggcgcggcgctgattgtgctggaaggcttcttaccgaacgcggctgcgaagaaacaggcgtaacaaactcgcccggcggcgctgccgccgggcaaaacaagtgagcaacctgcatgtctaaatcagtacagagcaacagtgcggtgctggtgcacttcaccttaaagctcgacgacggctccaccgcagagtcaacccgcaataacggtaaacccgcgctctttcgcctgggcgatacctcgctttctgaaggtcttgaacagcatctgctggggctgaaagaaggggataaaaccaccttttcgctggagccggacgccgcgtttggcataccgagcccggacctgattcaatatttctcgcgccgggagtttatcgacgcgggcgagccggaagtcggcgcgataatgctctttaccgcaatggatggcagcgaaatgcccggcgtgatccgcgaagtgaacggcgattcgatcaccgttgatttcaatcatccgctggccgggcgtaccgttcattttgatgttgaagtgctggagatcgatccggcgctggaggggtaagatgcagattctgttggctaacccgcgcggcttctgcgcaggcgttgaccgcgctatcagcattgttgaaaatgcgctgacgctatacggcgcgccgatctacgtgcgtcatgaagtcgtgcacaaccgctatgttgtcgacagcctgcgtcaacgcggcgctatttttatcgagcagattagcgaagtgccggacggcgccatcctgattttctccgcccacggcgtctctcaggccgttcgcaacgaggcgaaaagccgcgatttgacggtttttgacgccacctgcccgctggtgactaaagtgcatatggaagtcgcccgcgccagccgccgcggcgaagagtcgattctgattggccacgccggtcacccggaagtggaaggcaccatggggcagtacagcaacccgcagggggggatgtacctggtggaatcgccggacgatgtctggacgctggacgtgaaaaacgacgctaagctgtcgtttatgacccagacgacgctctccgtcgacgatacctccgacgtgattgacgctctgcgcgagcgcttcccgaaaatcgtcgggccgcgtaaagatgatatctgctacgccacgactaaccgtcaggaagccgtccgcgcgctggccgggcaggccgacgtggtgctggtggtggggtcgaagaactcctctaactctaaccgcctggccgagctggcgcagcggatggggaaagcggcctatctgatcgacgacgcgaccgatatccaggaagcctgggtcaaagaagcggattgcgtcggcgtgaccgcgggcgcatcggcgccggatatcctggtacagaacgtgatttcgcgtttgcaggagctgggcggcggcgaagcggtgccgctggaaggccgcgaagagaacatcgttttcgaggtgccgaaagagctgcgcgtagatgtccgtgaagtagagtaagttctttttcgccgcagtatgagaagatgccagacttaacgtctggcattttttatggagaaacgatgcgcttacctatcattctggataccgatcccggcattgatgacgccgcggcgattgccgccgcgctgttcgcccccgagcttgatctgcagctgatgactacggtggcgggcaacgtgtcggtggagaaaacgacccgcaacgcccttcagcttctgcatttctggaacgccgatgttcccctggcccagggcgcgtcgatgccgctggttcgccctctgcgcgacgccgcctcggtgcacggcgagtccggtatggaaggctacgatttcgttgaacatcaccgccagccgctggcgaaaccggcgtttcaggcgatccgcgacgcgctgatgcacgccccggagccgatgaccctggtggcgatcggcccgttaaccaacattgcgcttctgctgacccagtacccggaatgccgctttaatatccgtcgcctggcgatcatgggcggctccgccgggcgcggcaactttacgccgaatgcggaatttaacatcgccatcgaccccgaagcggcggctaaagtgttcaacagcgggctggatatcgtcatgtgcgggctggacgtcaccaatcaggcgatgctggcgccggattacctcgccactctgccaacgttgaatcagaccgggaaaatgctgcacgctctgtttagccactaccgtagcggcagcatgagcagcgggctgcgtatgcacgacctgtgcgcgattgcgtggttggttcgcccgcagctctttacccttgaaccgtgctttgtggcggtagaaacccagggtacatggacctcaggcaccacggtggttgatatcgaaggcaggctgggccagccggcaaatgcacgggtggcgctggggctggacgtcgaaggatttcagcgctgggcggccgaggtgattgccctggcgccttaaccgggggacgaagcggccggcgcggcgctcaggtattgtgagtggcatcaacgacgttgcgccatagcgcgcccgcttcatccgtccacataagcagtaagagcgaagctaatcgttccgccgccgcggagagaggtctgttctttacgcggatcataccaagcgtccgccggataaccggctccacgagcggaacgctcacgacggtgctattgccgctatggggcatagccagacagggaagcgccgagacgcccagtccggcttcgacaaggccgagcgaggtcgacaaatgcctgacttcataaaaccaatccagtcgccagggcttatccgccaggcatttctctattaactgtcggttgccgcttgatttcctgacgccgattaaggtctggctcaccagttcccgccattcgactaattttcgacacgccagagggtggtcttgccgacaggccagaacaaaaggctcattcaccagggggataaaatcgatgtctggatatgtgatgaagttcatgtttattccaaaatcaacttcgccttttcgtaccgagttcatgcacgtttctataccttgttcataaattcgtactttgatgttggggtagtttttattaaattgcacgatagcgcgcggtaaaaagtaaaatacggcggtcggaatgcaagatagcgtaacggtatcatgtaattgagacgttgaatcgttgaggttaaatattgccgcatcaagactggaaatcaacgctttggccttggggagcagtatttttccggcctgggtaagcgcaagttttcgcgtggttcgttcgaacagcgcaatattcagatgactctctattttttttatctttttggtgagtgccggctgcgagaggctgagctgctcggcggctttgctaaatgagccaagctctgccaccgtgacaaaggctttcataccggatagttcatttttcattattgctccgtagggtttaataagcgttgttctaagtagacgacaagtcattattaagcagacatgcttttttattaatacttagcaggaataactcttatggcaaaattttatcaaccagcgaaattcttgcaagtagaatgaatcggtaaaatatctgacgtgatttatctggccgttaattaagtaaataaaaatcttaaagaacataaaaccaattaaattcacgcggcgttttattcaattcttctatttatttctggcggataaggaacatgctatgaagagcattccctgtgtattaatgcgtggagggacatcaaaaggtgcctttctattagcagatgatttacctaaggatattcagaaacgtgatgagtgcttgttaaccataatgggatccggtcacgagctggagattgacggtattggcggagggagcccgcaaaccagtaaagtggccattattagtcaatccctaagcgacaaagcggatatcgattatctgtttgttcaggtcatcgtcaatgaacggcgggtggatacgacgccaaactgcggcaatatgctgtgcgcggttggcggctttgccattgaacatgggttggttaaggcggtgtcgccggttacgcgagtgcgtataagaaatgtgaacaccaatacctttgttgacgctgacgttcaaacaccagatggaaaggttatttatgaaggcgatacgaaaatcgatggcgttccaggccatgccgcgccggttgcgctgacttttctgaatgccgcgggcgcaaaatccggccagcttttcccaactggcaatcgtatggaagtctttgataatgtacgagtgacctgtattgatatggcgatgcctatggtggtgatcccggcccagagtctgggaaaaaccggatatgaatctgccagcgaattagatcgggatacagccttactcaaatcgctggaatctattcgccgtcaggccgggaaggctatggggtttggggatgtgagcaatatggttatccctaaaccggttctgatttctccggggctaagcggcggaacgataaatgtacgttattttatgccgcataactgtcataaatcgctggcgattaccggcgctatcggtctggcaagcgcatgcgttattccaggcaccattgcgaatgaactgacgaagctatcgggcgatggcgttattacggtcgaacaccccagcggggggatcgacgtcgatttaagtcatacagctgagcgcccggaggatattcgggcatcggttatacgcaccgcgcggaaaatcctttcaggaacggtttacatccccgaataaatatccaccctccgcttatctatcaatccaccgtagaagaggagaggggaggcatgtgaatacgttcagcaagcatcctcaaatattgagtgcaggtaaggaatggaaatgcaaaataataaattatggaagctgcttgttattatagtaataccgttactcatcagtttatgcccggcgccggaaggattatcaacacttgcctgggtattatccggtatctatctggcagcgattgtaggtttagtgattaaaccgttttctgaacccgtggtattgctgatcgccgttgcggcatcaatggtgattgtgggcaatttgggtgacggttcgataaaagccgccagcgtattaagcggatattcatcaggtaccacctggttagtcttttctgcatttaccctgagcgcggcatttgtgattaccggattgggtaaaagaattgcttatattcttatcggcaagattggtagcacgacgttgggccttggctatgttaccgcttttcttgacctgattctggcgcccgccacgccgtcgaatacggcccgcgccggcggcattgtcttacccataatcaatagcgtcgccgtcgccttagggtcagagccggagcggagcgcgaagcgcgtgggccattacctcatgctgaacatctatatggtcactaaaacgaccagctacatgttcttcaccgccatggccgggaatatcctcgcgctgaaaatgatcgaagatatttgccacctaaaattgagctggggaggatgggcgctggccgcaggactacctggcatcattatgttgctgctgacgccgctgattacctacaagctgtatccgccagaattaaagcgggttgataataaaaagattgctcagacaggcatagacgctttggggccgatgacggtgcgggaaaagatgctgtcttgcctctttgttcttgcgctcggcggttgggtattcagcagcgccctgggggtcaatgagtctaccgttgcaatctgcgtaatggcgctgatgctggtattgaaaatcgtcacctgggatgacgtgattaagaataaaggaggatggaatacgctcatctggtacgggggtattattggtttaagctcattgctctctaaggttggatttttcgtatggcttgcagaggcgcttaaaaataatatttcctttgatggccacggcaatgtcgcttttattgtgattgtcgcactgagcatactggttcgttatttcttcgcgtcagggagtgcttatattgtcgccatggtaccggtctttgccatgctggcgaatgtttctggcgcaccgataatgctcaccgcgctcgcgctattattcagcaactcttatgggggcatggtaacccactacggcggtgcggctgggccagttatttttggcgttggctataatgatatcaaatcatggtggattattggtgggatattagcattgctgacttttattctgcaaatcacccttggggtatggtggtgggagatgttaatcgcctggggggtaatttaaataatctttaaggagatgaaggtttgcccgggcatcctctgatgcccgggggtaagtcctcttattaagaaaacatagccttttagcaaggtgaggtgcgatatatttatgtctccagttacgattacgttgtcgctattggttttttctattgtcatgtttgtttgggaaaaaatacctttagcggtaacggccatgattgtttgtattactctggtggtgaccggggtttttgatgtcaaaacggcttttgccggttttattaatcaaaatgtgattttgtttgtggctatgtttgtggttggcggcgccttattcgaaaccggggtgacggataaaattggtagtatggttacacgctacgccaggacagaaaagcagctgatagtcgtcattatgctggtctgcggaacgctttccgggctgctatccaataccggcacggcggcggtcctcattcctgtggtgattggcgcagcgatgaaatcaggatatgcccggtcgcgcttgcttatgccgctggcttttgcctcggcgctggggggaaatttatcgctgatcggctcacccggcaatcttatcgcgcagtcggcgctggagcaggttggtcaacgcttcgggttttttgaatatgctaagttaggcattccgatgctggcctgcggcatactctattttgtgacgatcggctatcgcatattgccaaaaacgaatgcggcccagcgtcaaagtgttaataatattaaagcgcaggcatgcccgaaatataagcaggtgattgcgctatcggtattaatcctgaccgtactgggcatgatttttgagaaacagattggtttgccgattgcgatcgtcggttcaattggcgcattgtcgttgattgtgacccgggtcattacggaaaaacaggcttaccaggctatcgactcgcagacgattttcctcttcggcggcactctggcattagcaaaagcgctggaaaccaccggcgctggcgccattatggcgcgctcaattatcgcgttattaggccagcaggcgtcgcctttcttacttctgagcgccgtattgataatctcctgcgcgttaaccaatttcatgtcgaatacggcaaccgccgctttattaatgccgattggcctgtctattgctcattctatgggcgccgatccccgggcggtgttaatggcgattgttatcggctgttcatgtgcttacgcaacgccggtgggcaccccggctaatatgatgattttttccgcgggtggccacaaatttgtcgattacgttaaggttggattgccgcttattttgatatcggtcattgtcagctttattttgctgcctgttttcttcccattttattaatcgcggtcagccatttttatcgaatggctaatgtcaggcgtgttttttcaacatctaaggatatatgtgatgattaaattgtatgaccacggagtctatatatcacatcagcacggtattattgccgctgataaggggtcagtcgcgttagagaagcatgaggcgcgcaagggaacgatctcgtggtcgatcctctccgcccataatacttcagggaatgaacagcagttaaaaattaaatttgattcaatggcctcccacgatattacttttgtgggcatcatccagactgctaaggcctcgggaatggaacgttttccattaccctatgttctgacgaattgccataattcgctttgcgctgtcggcggcactatcaacagcgacgatcatatatttggtttgtcctcagcgcaaaaatatggcggtatttatgtcccgccccatatctcagttattcatcaatatatgcgcgagatgatggccggcggtgggaaaatgatcctgggctcagacagccatacgcgctatggcgctttagggaccatggcggttggcgaggggggcggcgagttggttaagcaactgctcggagagacctgggatattgattatcctgagattgtcgccgtgtatttgacagggaaaccctcgcccggcgttggccctcaggatattgccctggcgataattggcgcggtgttcgagcgcggttatgtgaaaaataaagttatggagtttgtggggcctggggtggcgacaatgtctaccgacttcaggaatagcgtagatgtgatgaccacggagaccacctgtttatcgtccatctggcaaacggatgaagagacaaaaaactacctgcgtattcacggcagggaacaagactattgtccgctctcagcaaaagagatggcctactatgatggctgcatagaagtgaatttaagcaccatcaagccgatgatcgccttgccttttcaccctgccaacgtatatgaaattgatacgcttaatgagaatttgcaggatattttgcacgaggttgagattgcggcggataacatttcccagggacgcgccaggctctccctgctggataaagtcgaacatggaaagctgcggattcagcaggggatcatcgctggctgcgctggcggaaattatgttaacgtggtcgaagcggctcatgccttgaaaaatcacgcctgcggcgatagcgctttctctctcgcgatatacccctcttcccagccggtgttgatggacctgactaaaaagggcatgaccaccgcgttattgagcgccggcgcaattatgcgtaccgcattttgcggcccctgcttcggcgcaggcgacacgcccatgcataatggactgagcattcgccacacgacgcgtaattttcccaaccgggaagggtccaaacccgggaatgggcaaatgtcggccgttgcgctgatggatgcccgctccatagcggcgacggctgccaatgggggcgtgctgacatcggcttccgcgctcgattgctgggaagacattccgcagtatgaatttgatgcttcaccttatcggagccgtgtttatcaagggtttattaaaggagcgtcccgccaatcgctgatctacggccccaatataaaagattggccggagatgagtgagctgacggacaatattttgttaaacgtgacctcaaaaatcatggatccggtgaccaccaccgatgaactgattccatcaggcgaaacctcatcatttcgctccaatccgttagggctggctgagtttaccctttcgcgacgcgatccgggctatgtcggccgtagtaagaagattgcggcgctggaaaaattacggatcgagggggacgatccttgtcgtctggagccgcagcttgaggcggttttttcccggatccgccaacttccggggcaggaaaatgtcacgcttgagcagacggagattggcagcatggtttatgcggtcaaacccggcgatggttccgcacgagagcaagccgccagctgccagagagtccttggtggcctggcaaatattgcccagcagtatgccacgaagcgctatcgttcgaacgtgattaactggggaatgctgccattgcagatgaaggcgctgccggagtttgaggtcggcgacttcatctatatcccggggatcaggtcagccctggaaaccgatctgcgtcagattaccgcgttcgtgatcggccacgatcgccccattaaagagatctctctttacatggaggggctcacctcagcagagcgggagataattaaggcgggaagcctgattaattataataaattacgcttaacaacccaccatcagtaaacgatattgatcatcaagatgaatcaacgggggtgatatcgcatcctcgtttttattcatagccgcttattccgtggttttcgatcgcggcgttagggctgggctacctgaagccggcttcatcttctcgctaagataatcaatcatcgcccgcattctggcgggcatatgcttattgcccgaccacagtagccagagctggccggaatagcggctgataaactcccactccggtaaaacctgcacaatctcgccgcgcgccagcgcctcacgggcggtaaacagcggcaggctgccgatgcccagattctgcttcacggcatcgaggcgcacggcggtatggttggcggcgtagcggccgtgagtctgaattgtttccgttttccccccgcggcggaacttccagcgcgaatcggcgggcgtctcgccaaggctgatacagctatgttcgcgcagatcctgcggcgtttgcggcgttccatagtgctccagatagccgggcgtcgcgcagatgacgtggctgatggtcatcaaaggcttaccgtgcagccccggcgagggggtagtggtgatacgcagcgccagatcgatgccgtcatcaataaaatcgagaacccgatcctcaagccgcagacagacgtcgatcttcgggtagcggttaaaaaattccagcatcagcgggtgaatggcaaaccgtcccacggctttcggcacgctgagcgtgagcttgccctgcgccaccgcctgggtactgctggcggagtccatggccagacgcgccgattccagcatctccagcgcatgttcatacaccattttcccggcatcgctgaggcgcagcttgcgcgtggtgcggtgcagcagcttgcagcccatctcctgctccaggcgcgagacgctgcggctgatcgccgaaggcgttgcgccagcctggcgtgcgacggcggagaagctgccctgttccacaatctgtacgaacagggcgaggtcgggcagtaggctcagattcatttgtgcttccgaagcaaaattgcgttgatgtcaggcgggattatcgccgccagcaatatcaatatactgtcctgacagagaggaggacaaccatgactgaacgcctttattacaccagcgacgccgaggaatgccttgcgcaagtcgtcaactgcctgagcgaagccgatggccgctatgccattgagctggatcgcacgctgtttcacccgcagggcggcgggcagccggcggatcgcggctggattgccggcctcgccgtcgagggcgtggttagccgcggcgatagcgtggcgcatatcgtttcacagccgctgccggccggcgaggtcacgatccgcatcgatccagagagccgacggctgcacgcgcgtctgcactccgccgggcacgcgcttgcccaggccggggagctgtcgggctggcagccgatcaaaggacatcactggccgggagaaagccgtattatttttgccccaggcgcgcatggcgggctgcccgaggccagcgcgctgctggaaaaagttgaggcctggcaggcagacaatttaccgcgtcagcttacttttgccgatggcctgcgcaaggtcgggttcggcgacatgcagagctatccctgcggcgggacgcacgtggccagcctgtccgaactgggtaaagtcgtcatttcccaggtgaagatgaaaaaagggcaaattattgtcagctacacggtggaataagcgagtgaaaaggagatgcacactcaacagggcatctcccggtgcttaaatatgcgcaggatgtttaccgtgataaatccgctccggtctgccgactttgccatagctgatttcagcctcaaggaaatcgtttttaacgccctgctcaaggtagcggcgggcggtggttttactactgccgagaatacgggccagggtgtctgcggtatggaccgtttccgggtcggcaaagagctgtaatacccgattaaaggtgctctcatcaataccccgcagcggagagcctgcggcttccgcgtgctcttttgcctggatattgaacagggcgtcaacatgggtctggcttgcctgctcgcttgagcgaagagagctgcgatagcgggcaaaacgctcaagcgtatgctgcaggcgctgatagtgaacgggtttaatcaggtaatcaaaaacgcccatccgcagggcttcgctgatggtatccatatggttgtcggcggtgatgaaaatgatgcgccctttataatgagtattgacggcgtggcggatcaaatcgagtcctttgccatcgggtaagaagttatccagcagggtgagctggggctgatagaggcgaagcatcttttttgcgctttccagtttatccgcaatgccaatgacttcgaactggggaaattgcttgatggtatccaccagaatttccgccagcataggttcgtcttcaacgatgagagtggtgatgctatccatggtgttcatctcgggtcagggggatataaagggtaaaaatagtgccaaaagggatgttgtcatcgacgacgatattgccgcccgcctgctcaacgtagctgcgaaccagccagagtccgatgccgtgatcgccgctgtcgctgctggtcacgccgcgctcaaaaatacgatcgcgcagcgattcctcaatcccgcagccctggtcggcgatctcgacgatcgcttcgccgccctcgctgttgatcaggcattcgatctgctttgaacctgccggctgacgtagggcagcgttgtaggcgttatccaacaaattgccgacgatcgagatccattcattatgcgacagcgaagaggggagagtttcaacgtggcaggcgggatcgaagaccagctctaatccgagctctttggcgcggtaatatttgccgatcagcagcccggcaaggtggttcactttaaaattgcgggcaataaaatcgagcactttctggtggctctcagactgctgctgaataagatccagcgcgttatcgtagcgttttaaaaacagcagcccggcaatggtggagatcagattgcgatgctcgtgctgtacggcacgcaggttatccgcgtactgctggacctggctgagctgcaggctcagagtgttgatatcgtctttactgcgaaagctaatgacccagccctggggctcgttattaagcgtgacggccatacggctggcgatcactttaatctgattaaaagtgacgatttcgtcttttttatttgtctgcggcgcgtcatagaagaatgcctcctgagagatcacgctgctgatgcttttgccaatcagaatggtttccggctggctcaggtttaatagcctccttgcggtttgattgatggcggtaattcggtagtgggagtcaatggctatcagcccctcaaagaccgattcaaacaggacgctctgctggataagcagctgtgagagctgctgtggttccatattcagcatctgttttttgatatgcagcgagaagcgccgggcgcagtagagcagcagaagcagcatgatcgccatcgggatcatcagcgatccgatttgcagactcagccagttttctaactgttcgatggtgtagcccaccgatacaataccgatcaccttcccggtgctgtcctggatcggcgacttgccgcgtaatgacgaaccgagcgatcctttacgcaccgacacgtagcttttggcgttatacagcgcctcgtcgctgtctccgccttccatcgatttaccgatttcctctggattcacgtgatacaggcgcctgcctttcgcgtcaccgacggtgatataggtggcgtcggaaaacgatcgcatcgggtcgataagttctttaatgcgcggtaaatcgtgcttttctaccgcgtcaaccagttcaggcatggcggagatctgcatggcctgaatcagcgcgcgctgtcccacctggtaatgcaggcgttcctccgtaatgctggtgagataccatgacatggccagcatcacgattgtcgaggtaaacaggatcaacaggaagatgcggttctgaaacgaacgtcgggcaaaccagtgcgtgatttttcgggcaaacattgggcgaattgacatcaaaaggtcattttctcttttttaggggccgacggcgctgaatcggcccacagatttactgatttcagaacacatccagtaggaatacgacgttttacgtaccacccgatcgggcttttgcgccgtagcctggggtatttcccggaggcggcgcgcggcgcccgtccgggcgggtagcccggctaagcgcagcgcgagccgggaacaacacgtttttacatcgccagcacgtacttgagcatcaccccggcggcaatcgccgagccaatcacccccgccacgttcgggcccatcgcgtgcatcagcaggaagttctgcgcgtccgactccagacccaccttgtttgacaccctggccgccatcggcaccgccgacaccccggccgagccaatcagcgggttgattttgttccggctgcacaggttcagcagctttgccatcagcacccccgccgccgtccccacgcagaacgcaatcacccccagcaccagtatccccagcgtctgcggctgcaggaacttgtccgccaccagcttggcccccaccgacagcccgaggaaaatggtcacgatatttatcagcccgttctgcaccgtgtcgctcaggcgctccaccaccccgctctcgcgcatcaggttgccgaagcagaacatccccagcagcggcgccgcgtccggcagcagcagcgccaccagcagcagcagcaccgccggaaagaggattttttcccgcttactcaccgtgcgcagctgcaccatgcggattttccgctccttctcgctggtcagcgccttcataatcggcggctggattaacggcaccagcgccatatacgagtacgccgccaccgcgatggccccgagtaattccggcgccagcttgcccgacagataaatcgccgtcgggccgtccgcgccgccgatgatgccgatggccgccgcctgcggcagggtgaagctgatgatgccgaagtagttcagcgtcagcgcccccagcaccgtggcgaagatgccgaactgcgccgccgcccccagcagcagggtgcgcgggttggccagcagcgggccgaagtcggtcatcgccccgacgcccataaaaatcaccagcggagcgatacccgagccgatggcgaccttatagaagatggccagcaccccggcggagtagcccatatccacggcgagctcctccatctgcccctgcaccgacggcagggccagcgccagcgcctccctgatggcgtggacatccggcgtacagtggagcttcgcggcaatcaccgccagctgcccggcgtcgtggtgggccagcaggctctccagggcggtcagcgccagcccggcctccgggatattcgacagcaggccgccgaagccaatcggcagcagcagcagcggctcgaacttcctcgcgatggccagccacagcagcagcaggctcaccagcagcatgacggcctggccggcgccgaggtgcatcagccccatgccctgaatcagggcgttcagactttccatttcgcgtcctcttccttacgccaggctcagcagggtgtcgcccaccgccaccgcgtccccggatttcaccgcgataccgcgcacggtcccggcctgcgcggcgcggatttcggtttccatcttcatggcttccagaatcagcagcacgtcgccctcggccaccgcctggccctcgccggcgatgactttccagatggtgcccgccagcggcgcggtcaccggggtgccggcacctgccggggcggctgcgggggccgtggcctgaacgggggccgctgccgtcagcgggctgatatcgccgccgtcgctgaccttcaccacaaaggccttgccttccacttccacggtgtagacgccggaggcggccggtttctctgctttcaccgccggtttgacctcttcagcctgcggtaccggctcaaaggccgccgggttgtggcggttctcaaggaacttcaggccgacctgcgggaacagggccacggtgagcacgtcgtcgatggcgttgtcggcaagctgaatattcttctcctgcgcctggcgcttcacgtcggcttccagatgcgccagctccggcttcagcaggtccgccggacggcaggtgatggcctctgctccgtccagcacgcgcgcctgtaatgccgcgttcaccggcaccggggtgtggccgtactcgcccttcagtatcccggcggtctccttcgcgatggttctgtagcgttcgccggtcagcacgttaagcaccgcctgggtgccgacaatctgcgaagtcggagtgaccagcgggataaagccgaggtcctcgcgcacgcgggggatttccgccagcacctcatccagacggtgggcggcgttctgctgcttcagctgcccctcgaggttggtgagcatcccgcccggcacctgggccacgaggatacggctgtcggtgcccttcagctggccttcaaaggcgtggtatttcctgcgcacctcgcggaagtacgccgcgatgctctcaagcttcaggatatccagcccggtgtcatgttttgtgcctgccagcgtcgccaccagcgcctcggtggccgggtggccgtaggtggcgctcatggaagagatggcggtatcgacgccgtcgacgccggcctcgatggccttcagcagggccatctccgccatcccggtggtggcatgagcatgcaggtgcagcctgacgtcatagcgctttttgatttcgctcaccagctcgaaggccgccatcggggtgagaatgccggacatgtccttaatcgcgatggaatcgacgccggtctccagcagctgttcggtcaggtcgagccaggtctgcagggtgtgggccggactggtggtgtaggagagcgtgccctgggcgtgggcgccgtggctgcgcaccgcctgcagggcggcctgcatattgcgcgggtcgttcatggcgtcgaagacgcggaacacgtccatgccgtttttgacggcgcgctcgacgaagcgctgcaccacgtcatcggcgtagtggcggtagccgagcaggttctggccgcggagcagcatctgcagcggggtcttcggcatggcctttttgagctcgcgcaggcggacccaggggtcctcgccgaggaagcggatgcaggcgtcaaaggtggcgccgccccagcattcaagggaccagtagcccgcgtcatcgagggcggccgcaacggggagcatatcgtcgaggcgcaggcgggtggcgaaaagggactggtgggcgtcgcgcaggacgacatcggtaatggcaacggtcatggattcctccgtgaattaagggttaagtcggcgatggtggtggatagcggcggcaatcaccggcgccaggcgggcgaagtcgtcagcgggcgctacggcggcgggtgcggccttcggcgcgggagccggttcggggaagaagcggttgacggcggcggacatgccgcggatggcgaaaatcagcagaaacagaaacgccagcacgaaccccatgccgaggaacatcagggtgaagccttcacccagcagaactgcatcactcatgaaaagatccaaaagtaagggcacgatggcgtgcctgaaggctaaccaaacgatacttccggctaaggagtagggtggatttcccgaagccgcccccggctctggaccctaaaaagcaccgctgtggttgacgctcaaacatcgccatcgtgcgtgttggttacatcatcatgccgaacacgatgctggcgatgaccagcacaataccgccgcccagacgggaggagatttgcgcataagagataagattcatacggttacaggccgagagcacttccaggtcgcccgagccgccgcggttggccatgcacagaccggcggtgatcgcggactcaatcgggaagaagccaatcatccagccgccgacggctgcgccgacgaccgcacccaccacgatcaccgccgcgatgatgacgttcgcgaaggtaatcgcgtcgataatttcctgcaggtcggtgtagcacacgccgacgccgaccatcagtacccacagcagctgcttagagaagaagtcagacaggcgtttggccccggctttgatctccggcgagcagaggccggaagcgttcagcgccgcgacgatcagcaccatccaggcgaaatagtggatagagacgccgccaatgcttggcaaaattttcttggcaataacgtaggccagcaggaaacaggtggtggcgagcaccaggccgacggcggtttcgcgatgggtaatctggcccgctttttcatcgtcgtcgactttaaaggaggctttacgcaccagttcgccttcaccgctcagcctggtgtgttttttaccgataatatcgaggagtgcagcaaagacgatggcaaagatgttggcgatggtcaggatagcaatcgcggtggagtagtactcttcacgcgaacggccggtgacggagtgataaatttcagacagcggcaccgcgcccgcgccgttgccgccgcccataatcggcaggacgtacagcatcatgatgcggtcgatggagataccgaagcacaggccaatgataatcccgaagatggatgcgccgaggatccccattaaaatggtcggaatataacccagcagagatttcagcagcagcttacggttaaccgagaggattgcgccggtaatcaatactgcgatgaataagttcaggaagttacttttatccatcacattagtgatcgcatcaatttctttctgggtgaaaatgccggcgtaaacgaaataggcggccacgaggaagatcatcaccggcgcgccgccaatatatttattgaagattggcaggcgtttgccaatttcgccaaaaacggcgccaataataaacatgatcgcaaagccaccaacaatgtcggtcggcagggcattataaaagtgtgaaagtagtaaagtgattaacgcaaaggcgtaaagcggtagcggcatgccgaagattttaaaccccagaatatcgctaaccccttttttctccgcagatggagcctggctcatattagtcatatgacgtcaccctgttaaaaaaaggaatatacacatcatccttcaagctgcctctttgttggcagccttcactcaccccagtcacttactatgcgtaagctcctggggattcattcagttaccgcctcgatgcaacttgaatgattttgtgtattaatgccgttagaaaaaacaataataggacggcggcataataataaatatgttccccggcgatatgtgattatcttcactgattagtcgtgtttttaattaatttaattgtttttattctgctgaattaattaacaacataaaaaccataaagccaattaaggtacgcggaaaaatgtgattgaaataaaagaaccgctgcgggaacgatggcgaaatacagctcgttttggtcaatgaagcgcgaaaaaaatgaatctgatagtaaaacgcgtcgcggtacagctcgacccacggcggcgagaggccgttgacctctttcttcatcagcaccagctcacgctggaggcggactgcgaatgggcgattatcgtcgagtaccagcggcgcattgtcggctgcggcgccattgccggatgcgtcctgaagtgtattgccgtcgacccgtcgctgcagggggaagggctcagcctgaagctgctgactgaactgatgaccctggcgtatgagctgggccgcagcgaactgtttctgttcactaaaccctataacgcggcgctcttctcctgcgccgggttctggcctatcgcccgcgcgggggagcaggccgtgttaatggaaaatagccgcgaacgtctggcccgctattgccgccagcttacgatgtatcgtcagcccggcgaaaaaatcggcgccatcgtgatgaacgccaatccctttaccctggggcatcgttggctggtggagcaggcggctcaacgctgcaactggctgcatctgttcgtggtgaaggaggatgcttcgtttttccgctaccgcgatcgcgtggcgctgattgaacaggggatcgccgggatcgccaacgtgaccctgcatccgggatcggcctatctgatctcgcgcgccacttttcccggctacttccttaaagacaaaggcgtggttgacgattgccacagccagatcgatctgcagctctttcgcgaacgtttagctccggcgctgggcgtgacccaccgctttgtcggcagcgaaccgctgtgtgaattaacccgtcgctacaaccagcgcatgcgccagctgctggaagcgcccggcgacgcgccggcgattcaggtggttgagctggcgcgggttgagaaagagggcgcgcccatttccgcttcccgggtgcgcaggctgtatcagcagcgccagtggtcgtcgattgcgccgctggtgccgccgggaaccctctcttttctgatgcatctggcggaaagcgaacaccaaaccgcctgatttacctccataactaaggatcagcctctatggaaatgatgattgacgccctggccggcacgctggaatccagcgatgtgatggtcaggatcgggcctgcgaatgagccaggtattcagcttgaaatcgacagcattgtgaagcagcagtttggcgcggcgattgagcgggtggtcagagagacgctgacgcagcttggcgttacccgggcgaacgtcgtcgtcgatgataaaggcgcgctcgaatgcgtactgaaggctcgggttcaggccgcggcgctgcgcgcggcgcaacaatctcaaccgcactggagtcagctatgaaacctcgtcgcagtatgctgtttatccccggcgccaacgccgcgatgttaagcacctcatttgtttacggcgctgacgcggtgatgttcgacctcgaagatgctgtctcgctccgtgaaaaagataccgcccgcctgctggtgcatcatgcgctacagcatccgctctaccgggacgtggaaaccgtggtgcgcattaacccgctcagcacgccgtttggtctcgccgaccttgaggcggtggtgcgcgcgggcgtcgatatggtgcgcctgcccaaaaccgatagcaaagaagatatccatgagctggaagcgcacgtcgagcggattgagcgcgaatgcggccgggaagtgggcagcacgaaattaatggcggcgatagagtcggcgctgggcgtagtgaacgcggttgagatcgctcgcgccagcccgcgcctgtcggccatcgcgctggcggccttcgattacgttatggatatgggcaccagccgcggcgatggcaccgaactgttttacgcccgctgcgcggtgctgcacgcggcgcgcgtcgccgggatcgcggcgtacgacgtggtgtggtcggatattaacaatgaagagggtttcctcgcggaagcgaatctggcgaagaatcttggctttaacggtaaatcgctggtcaacccgcgccagattgagctgctgcaccaggtttatgcccccacgctgaaagacgttgaacatgcgcgggaggtgatcgcggcggcggaagaggcggaagcgcgcggtctgggcgtggtatcgctgaacggcaagatgatagatggaccgattatcgatcatgcgcgcaaagtcgtggcgctgtcggcttccggcattcgtgattaaggagtaaataatgaaagagaccgtagcaatgcttaatcagcagtacgtgatgccggaaggattagcgccctatgcgggcgtgacggcgcagagcccgtggctggccagcgaaagcgaaaagcggcagcgtaaaatctgcgcctcgctggaggaggcgattcgccgttccgggctgcaaaacggtatgaccatctccttccatcacgcgtttcgcggcggcgacaaggtggtcaatatggtggtggcgaagctggctgaaatgggttttcgcgatctgacgctggcctcaagctcgctgatcgacgcccactggccgctgattgaacatattaagaatggcgtgatccgccagatttacacctccggtctgcgcgggaagctgggggaagcgatctccgccgggctgatggaaaacccggtacaaatccactctcacggcggccgggcgcatttagtgcaaaccggtgagctacgcattgatgtggcgttcctcggcgtgccgtgctgcgatgagtatggcaacgccaacggctttagcggtaaatcccgctgcggatcgctgggctacgccagagtggatgccgaggccgccggatgcgtggtgctgctcaccgaagagtgggtggattatccaaactatccggccagcatcgcccaggatcgggtcgatctgatcgtgcaggtcgacgaggtcggcgatccggcgaaaatcaccgccggggcgatccgtttgaccagcaacccgcgcgaactgctgatcgcccgccaggcggcgaaggtgatcgaacactctggctatttcaaagacggtttctcattgcagacggggaccggcggcgcatcgctggcggtgacccgcttcctcgaagataagatgcgtcgtaacaatattaccgccagctttggtctgggcgggatcaccggcacgatggtcgatctgcacgaaaagggtctgatcaaagcgctgctggatacccagtcttttgacggcgatgccgcgcgttcgctggccaataaccctaaccatattgaaatttccgctaatcagtacgccaatcccggttcgaaaggcgtctcctgcgaacgcctgaacgtggtgatgctgagcgcgctggagatcgataccggattcaacgttaacgtgatgaccggctccaacggcgtgctgcgcggggcatccggcggccacagcgatacggcggcaggcgcggatttaaccattatcaccgcgccgctggtgcgtgggcgtattccgtgcgtggtggagaaggtgctgactcgcgtgacgccgggcgccagcgtggatgtgctggtcaccgatcacggtatcgccgtcaacccggcgcgtcaggacctgattgataacctgcgtaacgcgggtatcccgctgatgaccattgaagagctgcagcagcgcgccgaactgttgaccggcacgcctgacccgatcgaattcaccgatcgggtggtggccgtggtgcgctatcgcgacggttcagtgattgatgtcattcatcaggtcaaaagcgccggttaaacgcgctgaggagaaaggcatgagcgaagtgatgataagccagcgtcgcccgttgagccgtcaaacggtgacggcggaggagatggtttctcgcgtggaacgagcgctgctgaccgaagtccgcctgacgccgaaaccgggcctggtggatattcgtaacgccggcgcgcatcgggatatggatctggcctcctttgaggccagcacggcggctgtcgcgccatggatggagaagtttttcattatgggccacgacacggccaatatcacgccggagcaggtattgacgatgctgcgtccggtgggcatggcgtgcgagacggatatgctggaggctaccggcggggtgaatacccatcgcggcgcgatcttcgcttttggcctgctcagcgcggcggcgggaaggctggtggccagaggggagccggttgaacagcaccgggtttgcgatcgggtggcccgcttctgccgcggcctggtcgggcgcgagctctcctctccagaaggaatgaaggtcagtaaaggcgaagggcatttcctgcgctacgggctctccggcgccagaggcgaagcggaaagcggctttcgcaccgtgcgcactcaggcgatgccggtcttcaatcgcgttatggcggacaccggcgataccaatctggcgttactgcagactctgctgcacctgatggcctggaatgacgataccaatctggtgtcgcgcggcgggctggaagggctcaattttgtgcagcagcaggcgcaaaagctgctgtgggaaggcggggtgctgtccgacggcgggatggacgcgctgcgccggctggatgatgagctgattattcgccaccttagcccgggcggcagcgccgacctgctggcggtcacctggttcctgtccggtttcccggccggcgagctgttcctgcactaatcgctgcttttctgtcgccgtattccccggattggccatacagggccaatccggggttgcggactgcgcgcgctcctcgcttctcactactccacggcaaattcccggcacaatcttatagtttttactgatatcggcggcagtttgtcataaatttctaattatcggtgtttttgagtagcggctcatcgttgggctggttactctgaaaacaatttacgtagtgttaacaaaagagaatagctatgcatgatgcacaaatccgcgtggccatcgcgggcgcgggcggccggatgggacgccagttaattcaggcggtacagcagatggacggcgcggcgcttggcgcggcgctggagcgcgaaggttcctcgctgctcggcagcgatgcgggcgagctggcgggcgcgggcaggtcaggggtggtggtgcaaagcagccttgaggcggtaaaagacgattttgacgttttcatcgattttacccgcccggaaggcacgctggcccatcttgcgttttgccgtcaacacggcaaaggcatggttatcggcaccaccggctttgacgacgccgggaagcaggcgattcgcgacgcttcgcaggagatcgccatcgtgtttgccgccaacttcagcgtcggcgtcaacgtgatgcttaagctgctggaaaaggcggcgaaggtgatgggcgactataccgatattgagattatcgaagcgcatcatcgtcacaaagtcgacgcgccatcgggtacggcgctggcgatgggcgaggcgattgccggagccctggataaagatctgaaagcgtgtgcggtctacagtcgcgaaggctataccggcgaacgcgttcccggcaccatcggctttgcgaccgtgcgcgccggggatatcgtcggcgaacatacggcgatgtttgcggatatcggcgaacgtattgagatcagccataaggcttccagccgaatgacttttgcaaatggtgccgttcgttccgctttatggataaaaggcaagaaaaacggtctttttgatatgcgtgatgtgcttgagttgaactctttataacgattattacccatcgtgatgtggttattgctttcaataagtaattgattgcaaggggcaatgtcttattgcccttttttatttttggcgtttaatcgattttttatcgccaggcctgaaaaatactatcttatccgccttatttttgttgttttattgtaaattttgaccatctggtctactttttcaatccctgcccggcgattttacaaacatcctcctccgcaagcgttttcccgggcgagttaggtgatctttttgcccgttaaggcaggtattgctgaatagtggcctgaaacaagattaaaaatatccgctttaagttgacttttatccgccatctctccagaatgccgccgtttgccaaaattctgcgggcaacagatttgcattgattcagatctacattatgaattaatatgcaaataaagtgagtggatattctctggagggtgttttgattaagtcagcgctattggttctggaagacggaacccagtttcacggtcgggccattggggctaccggcacggcggttggggaagtcgttttcaatacttcaatgaccggttatcaagaaatcctcactgatccttcctattcccgccaaatcgtcactctaacttatccccatatcggcaacgtcggcaccaatgccgccgatgaagaagcttctcaggtacatgcgcagggtctggtcattcgcgatctgccgctgattgccagcaacttccgcaataccgaagacctctcttcttatctgaagcgccacaatatcgtggcgattgccgatatcgatacccgtaagctgacccgcctgctgcgcgaaaaaggcgcgcagaacggctgcatcatcgccggcgatagcccggatgcgcagctggcgctggaaaaagcgaaagcgttcccgggcctcaacggcatggatctggcgaaggaagtgaccaccgcagaaacctacagctggacgcaggggagctggacgctggcgggcgacctgccggaagccaaagcggaaagcgagctgccgttccacgtggtggcctacgatttcggcgccaagcgcaacatcctgcgcatgctggtcgatcgcggctgccgtctgacggtggtgccggcaaagacctccgctgaagaggtgctgaaaatgaatccggacggtatcttcctgtccaacggtcccggcgatccggcgccctgcgactacgctatcgcagcgattgagaagttcctggagaccgatattccggtattcggcatctgcctcggccaccagctgctggctctggcgagcggcgcgaagaccgtgaagatgaagttcggccaccacggcggcaaccatccggtaaaagatattgataacaacgtggtgatgatcaccgcgcagaaccacggctttgcggtggatgaggcgtctatgcccgcccacctgcgcgtgacccacaagtcgctgttcgacggcaccctgcaggggattcaccgtaccgataaaccggcgttcagcttccagggacatccggaggcgagccctggcccgcacgatgccgcaccgctgttcgaccattttatcgaattaattgagcagtaccgtcagtccgcgaaataatcaggagttaagagagccatgccaaaacgtacagatataaaaagcatcctgattctgggcgcgggcccgattgttatcggtcaggcgtgtgagtttgactactccggcgcccaggcgtgtaaagcgctgcgcgaagagggctaccgcgttattctggtgaactctaacccggccactatcatgaccgacccggaaatggctgatgccacctacatcgagccgattcactgggaagtggtgcgcaagatcatcgagaaagagcgtccggatgcggttctgccgaccatgggcggccagacggcgctgaactgcgcgctggagctggagcgtcagggcgtgcttgaagagttcggcgtgaccatgattggcgcgaccgccgacgcgattgataaagccgaagaccgtcgccgtttcgacgtggcgatgaagaaaatcggtctcgataccgcgcgttccggtatcgcgcataccatggaagaagcgctggcggttgccgctgaagttggcttcccgtgcatcatccgtccgtcctttacgatgggcggcaccggcggcggtatcgcctacaaccgcgaagagttcgaagagatctgcgaacgcggtctggatctctccccgaccaacgagctgctgattgatgaatcgctgatcggctggaaagagtacgagatggaagtagtgcgtgataaaaacgacaactgcatcatcgtctgctccatcgaaaacttcgacgcgatgggcatccacaccggcgactccatcaccgtggcgccggcgcagaccctgaccgacaaagagtaccaaatcatgcgtaacgcttcgatggcggtactgcgtgaaatcggcgtagaaaccggcggctccaacgttcagttctcggtgaacccgaaagatggtcgcctgatcgttatcgaaatgaacccgcgcgtctcccgctcctcggcgctggcctcgaaagccaccggcttcccgatcgctaaagtggcggcgaagctggcggttggttacacccttgatgagctgatgaacgatatcaccggcggccgcaccccggcgtcgtttgagccgtccatcgactacgtcgtgaccaaaatcccacgcttcaactttgaaaaattcgtcggcgcgaacgaccgtctgaccacccagatgaagtcggtgggcgaagtgatggcgattggccgtacccagcaggagtccctgcagaaagcgctgcgcggcctggaagtgggcgctaccggtttcgacccgaaagtgagcctcgatgacccggaagcgctgaccaagattcgccgcgagctgaaagacgcgggcgctgagcgtatctggtacatcgctgacgctttccgcgcgggcctctccgttgatggcgtattcaacctgaccaatatcgaccgctggttcctggtgcagattgaagagctggtgcgtctggaagagaaagtggctgaagtcggtattaccggcctcgacgccgacttcctgcgtcagctcaagcgtaaaggctttgccgatgcgcgtctggcgaagctggctggcgtgcgcgaagcggaaatccgcaagctgcgcgaccagtatgacctgcacccggtctacaagcgcgtggatacctgcgcggcggaattcgctaccgacaccgcctacatgtactccacttatgaagacgagtgcgaagccaacccgtccgttgaccgcgacaaaatcatggtgctcggcggcggcccgaaccgtatcggccagggcatcgagttcgactactgctgcgtccatgcctccctggcgctgcgcgaagacggctacgagaccattatggtcaactgtaacccggaaaccgtctctaccgactacgacacctccgaccgcctctactttgagccggtgacgctggaagacgtgctggaaatcgtgcgcattgagaaaccgaaaggcgttatcgtgcagtacggcggccagacgccgctgaagctggcgcgcgcgctggaagcggcaggcgtgccggttatcggcaccagcccggatgccatcgaccgtgcggaagaccgcgagcgcttccagcacgcggttgaccgcctgaagctgaagcagccggcgaacgccaccgtgaccgcgatcgaaatggcggtcgaaaaggcgaaagagattggctacccgctggtggtgcgtccgtcctacgttctcggcggccgcgcgatggaaatcgtctacgacgaaatcgacctgcgtcgctacttccagactgccgtcagcgtctctaacgatgcgccggtgctgctggaccgcttccttgacgatgcggttgaagtcgacgtcgatgcgatctgcgacggcgaaatggtgctgattggcggcatcatggagcatattgagcaggcgggcgtgcactccggcgactccgcgtgttcgctgccggcttacactctgagccaggaaattcaggacgtgatgcgcgagcaggtgcagaagctggcctttgagctgcaggtgcgcggcctgatgaacgtgcagtttgcggtcaaaaacaacgaagtctacctgattgaagtcaacccgcgcgcggcgcgtaccgtcccgttcgtctcgaaagccaccggcgtaccgctggcgaaagtcgcggcgcgcgtgatggcgggcaaaacgctggctcagcagggcgtcacgaaagagatcatcccaccgtactattcggtgaaagaggtggtgctgccgtttaacaaattcccgggcgtcgacccgctgttagggccagaaatgcgctctaccggtgaagtcatgggcgtaggccgcaccttcgcggaagcgttcgccaaggcgcagctgggcagcaactcgacgatgaagaaacagggacgcgcgctgctctccgttcgcgaaggcgacaaagagcgcgtggtggatctggcggcaaaactgctgaagtttggtttcgagctggatgcgacccacggtaccgcgattgtgctgggcgaagccggcatcaacccgcgtctggtgaacaaggtgcatgaaggccgtccgcacattcaggaccgcatcaagaatggcgaatacacctacatcatcaacaccaccgcgggccgccaggcgattgaagactccaagctgattcgccgcagcgccctgcagtacaaagtgcactacgacaccacgctgaacggtggtttcgcgaccgcaatggcgctgaatgccaacgcgatggaaaaagtgacctcggtgcaggaaatgcacgcgcagattaaaaagtaatattatctgccagtaaaagcgcctccggtggccacgccggaggcgcttttttttgcgtgacgataagcctgggcggaataaagtgacgctcccctcggcgctgaacgtcgaacaaaaacagggggatcggcgttaacaggccacttcggagagttctggttttctctcgccggacagtcagctagcctaaagtggttagggtgataatgaatatgacttagagcctatcccagtaggcgttattggcgcagccagtttggatacggacagcgcggagaaaccggagcgtacacgtagtacgtgaggatttcgggcactgcccaggtccaaaatggcaagtgaaatagtcctaatgggataggctcttaataacgggagagaaacaccatgcacaacaagcccctcaccgctgctatcttcgccgctgccgcactgttcaccgtggccggctgttcatctaatcagtcgctaaaaacgaccgacggaaaaaccattgtcaccgatggcaaaccgcaggtggatgacgacaccggcctggtgtcctacaaaaacgcggaaaccggccgcaccgagcagatcaatcgcgatcaggttaagtccatggacgaactggataactaagcgttatccacggccccgtaccgcggggtcacgcctgcctgaccgatcctcgccctgaacgagagataaatcacacttatcactgtaagcggttcgattaactgtctacactcttgctgattacaacaagagctaacgcaggctaatcaatgatcctcataatttatgcgcacccttatccgcagcactcgcatgcgaataagcggatgcttgagcaggcagggacgcttgacggcgtcgagatacgctctctctatcaactttaccccgatttcaatatcgatatcgctgccgagcaggcggcgctggcccgtgccgatctggtcatctggcagcatccgatgcagtggtacagcgtgccgccgctgctcaagctgtggatggacaaagtgctggcgcacggctgggcatacgggcacaacggtatcgcgctgcgcggtaaatcgctgatgtgggcggtgaccaccggcggcggcgaaagccactttgatattggttcctttcccggtttcgacgtcctggcgcagccgctgcaggcgaccgcgctgtattgcggcatgaaatggctgccgccgttcgcgatgcattgcacttttatctgcgatgacgaaacccttcaggcgcaggcgcgccactaccgtcaacgtttaatcgaatggcaggaggcgcacaataatggatagccatacgctgatacaggcgctgatctatttaggatccgccgcgctgatcgtgccgattgccgtacgccttgggctggggtcggtgctcggctacctaattgccggctgtattattggcccgtgggggctgcggctggtcaccgacgccgagtcgattttgcacttcgcggaaatcggcgtggtgctgatgcttttcgttatcggtcttgagctcgatccccagcggctgtggaaactgcgcgcctcggtgttcggcggcggggcgctgcagatggtcgtctgtggcgtgctgattggcctgttctgcatgtcgctgggtctgcgctggcaggttgccgagctgattggcatgaccctggcgctctcctcaacggcgatcgctatgcaggcgatgaacgaacgtaacctgacggttacccagctgggccgcagcgcctttgcggtgctgctgttccaggatatcgcggccattcctctggtggcgatgatcccgctgctggcggcgagcggcggctcgacgacgctgggcgcgtttgcgctctcggccctgaaagtagcgggcgcgctggcgctggtggtggcgctcggacgctatctgacccggccgatgctgcgttttgtcgcgcgctccggcctgcgtgaagtcttcagcgccgtggcgctgttcctggtgtttggcttcgggctgctgctggaagaggtcgggctgtcgatggcgatgggggccttcctcgccggcgtgctgctggcgagctcggagtaccgccacgccctggagagcgacattgaaccgtttaagggcctgctgctggggctgttttttatcggcgtcgggatgtctatcgacttcggtaccctggtgacgcatccgctgcggatcctgattctgctggtgggattcctggtgattaaatccctgatgctgtggctgatcgcccggccgttaggcgttccgcgcgcccagcgccgctggtttgcggtgctgctggggcaggggagcgaattcgcctttgtggtcttcggcgcggcgcagatggccgatgtcctggacggcgaatgggcgaaggcgctgaccctcgcggtggcgctatcaatggcggccacgccaatcctgctggtgctgctgacccgcctggagaaatccgccagcggccaggagcgcgaagccgatgaaattgacgaagagcagccgcgggtgattatcgccggctttggtcgttacgggcagatcgccggccgcgtactgctctccagcggggtgaagatggtgattctcgatcacgatcctgaccacgtcgacaccctgcgtaaatttgatatgaaggtgttctacggcgatgcgacgcgggtggacctgctggagtcggcgggggcggaaaaggcggaagtgctgattaacgccatcgacgatccgcagacgaacctgcagctggcggagctggcaaaagagcatttcccgcatctgcagatcatctcccgcgcccgcgatgtcgatcattacatcaagctgcgccaggccggggtcgaagcgccggagcgtgaaaccttcgaagcggcgctgaagtccggacgcatgacgctggaggcgctgggcctgggcgcctacgaggcccgcgaacgggccgatctgttccgccgtttcaatctgcaaatggtggaagagatggtggcgatggcggaaaacgacgcggcttcccgggtggcggtattcaagcgcaccagcgatatgctgaccggcattatcaacgaagaccgcaatcatttatcgctggttcagcgtcacggctggcaaggaacggaagagggacggcataccggtgacatcgccgatgagccgcaaaataagccctcggcataagggagaattcagggtgttacgttagctttacaagtaacattttgttttcaatttaaatcctgcctggcggctcacggggcttacgtgggctcgccagcaaatcttaaaattttctgattctttactcttcgcccagtcgacgaagtattacgctttccgtatagtggcgacaattttttgcattcgggaattattcaatgatcagtctgattgcggcgttagcggtagatcgcgtcattggtatggaaaacgccatgccatggaatctgcctgccgatctcgcctggtttaagcgcaataccttaaacaaaccggtagtgatgggacgtcttacctgggaatccatcggtcgtccgttaccggggcgtaaaaatatcgtgattagcagccagcccggcaccgacgatcgcgtgcagtgggtcaaatcggtagatgaagccattgccgcctgcggcgacgtggaagagatgatggtgatcggcggcggacgcgtgtacgagcagttcctgccgaaagcgcacaagctctatctgacccatattgatgcggaagtggaaggggatacccacttcccggattacgatccggatgagtgggagtcggtattcagcgagttccacgatgccgatgcgcagaattcccatagctactgcttcgagattctggagcgccgctaaggttttccccggtgacgttcgctcaccggggtgactctcttcaggaggcgatcgcctcgccttcatcaagattgctctgccggttcgatcgctgcgtgaagtacgttttatcttcccagcgcaggcaggtcagatcgccgccccagcagcagccggtatccagcgcgtaaatcccttccggcgtgcctttcccttccagcgaagcccaatgaccgaaggcaatgctgtactcgctggccaccggcccgggaatagcaaaccacggcttgagcggcgcgggcgcgttttccggcgcctccttggcgtacatatccagctgcccgttcgggaagcagtagcgcatgcgggtaaaggcgttggagataaagcgcaggcgcgccaggccgctgagttcgttgctccagttgttcggcatatcgccgtacatcgcatcaaggaagaacggataggagtcgctggcaagtacggcttccacatcgcgggcgcactgtttggcggtttccagatcccactgcggggtgatcccggcatgggccatgaccagctttttctcttcatcgatttgcatcatcggctgacgacgcagccagttgagcagatcgtcggcgtccggcgcctcaagcagcgatttcagccgatccttgggtttattgcggctaatgcccgcaaagaccgccagcaggtgcaggtcatgattgcccagaacgaggcgtacgctatcgccaagctgtttcacgaaacgcagtacttcgagcgaaccggggccgcgcgcgaccaggtcgcccgtgagccacagcgtatcagtctcagggttaaactccacctgctctaataatgcgatcagttcatcgtagcaaccgtgaacgtcgccaataaggtatgtagacatgttttaatggatgagagtgggtactgcgagacggaaaacagggatttcgatggtgaacggcgcgccgttcacatcgatcatcgcataatgtccctgcatggtgcccagcggcgtttcaatgaccgcgccgctggtatattgatattcgccgccggccggaatatgcggctgctcgccgaccacgccttcaccctggacttcggtctcacgaccgtggccgttggtgataagccagtagcggccaagaagctgaacctgcgtccgccccagattgcgaatggtcacggtataagcgaagacgtagcgctcttcttgcggagaagattgcgattcgatgtagacgctttgcacctgtacacaaactcggggcgaattaatcatggttagctctccttggtgggcgcgttctcagataaccagttagctagctgacagtactgcgctacggaaatattctctgcgcgcttcgccggatcgatgcccagttcggtcagaacctcaacgctgaacaggttgccgagactgttgcggatcgttttccgacgctggttaaaggcttccgtcgtgatacggctcagtacgcgcacttctttcaccggatgcggcagcgtgcggtaaggcaccagacgcaccacggcggaatcgactttaggcggcggcgtaaaggcgctcggcggaacttcaagcaccggaatgatctggcagtagtactgcgccattacgcttaaccgaccatacgccttactgttcggcccggcaaccaggcgattgacgacctctttttgcagcataaagtgcatatcggcaatggcatcagtatagctgaacagatggaacatcagcggggtcgagatgttgtacggcaggttgccgaatacgcgcagcggctggcccatgttctgcgacagctcgccgaagttcatggtcatcgcgtcctgctgataaatcgtcagcttaggtccgaggaacggatgcgtctgcagacgagcggccaggtcgcggtccagctcgataacggtgagctggtcgaggcgttcaccgaccggttcggtcagcgcggcgaggccggggccgatttcaacaatcgcctggcctttttgtggattgatggccgagacaatgctgtcgatcacaaactgatcgttgagaaagttttgcccgaagcgtttacgggctaagtggccctgatggactcgattattcattgagtattaacaatcattttaatggcgagattaagcgccgtgataaaactgccgacttccgctttcccctggcccgcaagttcaagcgcggtgccgtggtcaacggaagtgcgaataaatggtaaaccgagcgtaatgttcacgccgcggccaaagccctggtattttagcacgggcaggccctgatcgtgatacatcgcgagtaccgcatcggcttggtcgaggtatttcggctgaaacagggtatccgccggcagcgggccgctgagattcatccccttcgcgcgcatctcttcgagcaccggaatgatggtatcgatctcttccatccccatatggccgccttcgcccgcgtgcgggttcaggccgcaaaccagcacgtgcgggttgctgataccaaatttggtgcgcagatcgtgatccaggatagtgatgatttcccgcagcagctcaggggtaatcgcatcgcttatcgcttttagcggcaggtgagtggtcaccagcgccacgcgcagcgcttcggtcgccagcatcatcaccactttactggcctgcgagcgctcttcaaagaactcggtatgaccggtaaaggcgatccccgcatcgttaataatgcccttgtgcaccggcccggtaatcagcgcggcgaattcgccgttcaggcagccatcgcaggcgcgggccagcgtttccaccacgtagctgccgttgctgacgttgagcacgcccggttcaaccggcgcgttgagcgcgacggggagaagggtcagggtacctgcacgctgcggcgtagcgggagcggtggggttgtaaggcagaagcgataaaggaagaccgagcaggttcgcccggtcagacagcagagcgccatcggcgcagatcaccagctctaccggccagtcgcgctgcgcaagctgcacaacgaggtcggggccaatcccggcgggttcaccgggagtgataacaactcgattcatacacgtcatccttcaggcggtctcttactggctgcgcttcgtcgcccccgtcagagaccggggcgatttgctcagccgcctcgatacaccctgagcgatgttgtgtatgaggctaatgcaattagttgctcagaaccttcacgtaggcgctggcgcgctgttcctgcatccaggtcgccgcttcttcagagaacttacggttcatcagcatgcggtaagcacgatctttttgcgcggcgtcggttctgtcgacgttgcgggtatccagcagctcaatcaggtgccagccgaaggaggagtgaaccggagcgctggtctggcctttattgaggcgcagaatggcgtcgcggaaggccggatcgaagatatccggcgtcgcccagcctaaatcaccgccctggttggcagagcccggatcttcagagaactcttttgccgctttggcaaaggtggtttttccactcttaatatccgccgcgatctgctccagcttcgcccgagcctgatcgtcgttcatgatcggcgacggtttcagcaggatatggcgagcgtgaacttcggtcacggagatgttctggctgccgccgcgcatatcgttaattttcaggatatggaagcccacgccggaacgtatcgggccgacgatatcgccttttttcgcggtgctcagcgcctgggcgaagatgcccggcagttcctgaatccggccccagcccatctggccgcctttcagcgcctgctggtcggcagagtaggtgatagccagtttgccaaagtccgcgccgctgcgcgcctgctgaaccactgaattggcctgatcctgagcctctgccacctgctcggacgttgggttttccggcagcgggatcagtatgtggctgagattcagctcggtgctggcgtcgttctgatcgccaatctgtttggccagggtttcaacttcctgcggcagaacggtgatacgacgacggacttcgttgttacgtacttccgaaatcagcatctctttacgaatctgattacggtaggtgctgtagttgataccgtcataggccagacggctgcgcatctgatccatggtcatgttgttttgtttggcgatgttggcgatggcctggtcgagctgatcgtcagagatcttcacgcccattttctggcccatctgcaggacaatctggtccatgatcagacgctcaaggatctgatgacgcagggtggcgtcatccggcagctgctgcccggcctggccggcgttcagttttaccgattgcatcaagccatcgacgtcgctttcaagaacaacgccattattgacgacagccgctactttatcgacaacctgtggggcagcgaaactggtattcgcgatcatggcgataccgagaagcagcgttttccagttcttcatactttttccatttcaattaaccgcaattgcggattacgtgtaaaccagccacatcacagggagctctggtacggtaaaatgttcgaacgcagcatctgctgggtgccgagaccgtagttggagctcaggccgcgcagctcaatgttaaagccgaaggtgttgtcgtatttgctttcgctgctgctgttatcccagccgttgatcttacgttcatagccgacgcggatagcgtagcagcaggagctatactgaacccctaacatctggttcgctgactttctggtattcgtgtcgtagtaatacgcgccgacgactgcccaacgatcgacgattggccagctggcggtcatccccacctgcgagataccatctttgtactgcttagcggtggaataagacggcagggtcgcctgaatgtattccgggctcgcataacgatagttaagttgtactaaacggttttcgtcgcgacggtattccacggttccgctgccggttgcgacgttatccagacgcgtatcgtactgaattcccccgcgtaaaccccagtcatcggcgatgcgccagtaggtatcgccagcccataccagtgaacctcgcgtgtcgttgttctcccagttgatgttgtcgtcaccggtacgtgcctcggtgaaatagtagatttgaccaacggaaatattaaaacgttcaacggcggcggcatcataaacgcgagatgtgacgccggtggagacctggttggcggaagcgatacggtcgaggccgctataggtacggtcgcggaacaggccgctgtagtccgactgcagcagggttgagtcgtagctgccgatcttgctctggtcacgataggggatatacagatactgcatccgcggctcaagcgtctgggtatagttctcctgcatatcgcgctcgaaaaccattttaccatcgactttaaactgcggcatgacgcggttaacggagtctttgtaatcggtaccgttggccgcattgtagtcatcaaggttgctttgctggtaatgggttgccagcagttttgcctcagtattgatgcttccccagccgttagacagcggcagattgatggttggctcgaagtgaacgcgcgttgcttccggcattctgctgttcgagttaacaaaatgcaccgcctggccataaagatgggtatcaaacgggccgacatcgttctggtagtagttcacgtccagctgcggctcggctgaataggcgttgcttgagtcgcggttaaagacctggaactgcttggtcgatacggtggcgtcaaagttctgattcgcgtagccggcgctgagcttctgcgtcgcgtagccatcggtactggaaccgtatttagagctgaagtcgttaaagtagtccgggtcgctgactttggtgtagtcggcgttgaagcgccacacctggtctacgacgccagaatggttccagtagaacagccagcggcggctattgctgtcgccagagtgatcgtcctggtaaattttatccgaaggcaggtagtcgaactcgattaggccggttcctgctttggtcagatagcggaattcgttctcccacatgacgccgccgcgcttgctcatatagtgcggcgtcagcgtggcgtcgaagttcggggcgatgttccagtagtaaggaagatagaactcgacgccgtttttggtgctgtatttggcgttggggatcaggaagcccgaacgacgcttgtcgcccaccggcagctgcaggtagggactataaaaaatcggtacggaaccgagcttgaagcgggcgttccagatctcagcgacctgttcttcgcggtcgtggatgacttcactgccgaccacgctccaggtgtcagagcccggcagacaggaggtgaagctgccgttttctaagatggtatagcggttttcaccgcgctgtttcatcaggtcagcggtaccgcgcccctgacggccaaccatttggtaatcgccctgccagacgttggtatctttggtgttcagattcgaccaggctttcggccctttgaggatcacctgattgtcatcatagtgaacgttgccgagggcgtcgaccgtgcgcaccggctgcggctggcccgcggcctgctgctggtgaagctgcacttcatcggcctgcagtcggctgttcccctgattgatatcaacgttgccggtaaatacggcgttatcaggatagttgcctttcgcatgatcggcatcgatcgtcaccggcaggtcgttgggtttcccttcaaccaaaggacgattgtagcttggtacgccaagcatacactgcgtggcgagatcggcagcgaggccctgttggctatacaaggcgctggcaatcatggtggccaggaggctgggaatacgttttttcatacgttgtatttgttgttccgtcatcgtgtggcagcggcttgcaaacggtcagagcctaacgtactcgtctaaatcgcgctagtgttaatcctgcccgtttcgagcccgagcgttaggcaccgtgtagaatgacgagtatgataaagcaaattataggctatgtcccacaattgaccgaggcgtaaacgctttgtaacgtgcggtcagatatagcttaactggcggcagagagattggggagtctatgcagtatttgggtaaaataattggcgttgcggttgcgttgatgatgggcggcggcttttggggcgtggtgctgggcttcttaatcgggcatatgtttgaccgcgcgcgcagccgccggctgaacgtctttgctaatcagcaggagcgccagtcgctgttcttctcgacgacgtttgaagtgatggggcatctgaccaaatcgaaagggcgggtcaccgaagccgatattcaggtcgccaatttgctgatggatcgcatgaacctgcacggcgaagcgcgtaccgcggcccagcacgcgtttcgcgtagggaaatcagatgattacccgctgcgggagaaaatgcgccagctgcgcagcgtctgctttgggcgttttgatttaattcggatgtttctggaaattcagctgcaggcggctttcgccgacggcgaactgcatcccaacgaacgtgacgtgctgtttgtgattgccgacgagctgggcatctcccgcgctcagttcgaacagttcctgcgcatgatgcagggcggggcgcagtttggcggcggttcgcagcagcaatcttacggccagcgcggcggcaacgccggctggcagcaggcgcagcgcgggccaacccttgaagatgcctgcaatgtgctgggcgtcaaaccgaccgacgatgccgccaccgtcaagcgcgcctatcgtaagctgatgagcgagcaccatccggataagctggtggcgaaagggctaccgccggaaatgatggagatggctaagcagaaagcgcaggagatccagaaagcctgggaactgattaaagagcagcgcggcttctaaacgaccggcctctcccgggtgggagaggcgtcacgatacgctggcggcgcggcggtacatacgccgcggatggccaatcttgccgtacagcatttccacctccagaaagccgatttccacgcagtgctccagatagcgacgggccgtggttttgctcaagccagcctcgctcaccacgtcatcaaccgaaaagcagcgctcttcttcgccgataaacaggctctgcaccagcgccagcgttttttcttcaatgcctttactgccgctatcggctcggtagtttttagcctgcagctgatacagcgaatccacgttctgctggtcgacgattttccattcgcgctgctgatcgtagaactgcacgaaccgttcaagggactggctcaggcgcttccatgataccggcttaagaatgtagtcgaaggcgccgttgcggattgcctggctacaggtttccatgtcgctggcggcggtgataaagatcaccgagcagttagcatgggccataatagggtcgttcatcagggtgacccctttgccgtccggcaggtagttatccagcagcaccagctgcggcggtctggcgttgagtatctgccgcgcctgggcgagagaggccgccgtgccggtcagccgcatgcgcgggtgtttctggataagctcggcgtgcagccgcgccagttcgctttcatcttcaacgatcaggacatcgaccaggtcatgatgcatagtgcgtctcttcttgcggatgggctggcccgctggcgggaataaacagcgtgaaaatcgccccgcgcggcgcgttgtcggccacttcaatcgtgccgccagcctgggtgacatagcgctcaataagatacagtccaataccgtgatcgccgcgggttttggtggtgacgccgcgctcaaatatatgctcgcggatctccggacgaataccgacgccgcgatcggcgacttcaatcattaattcccgggcgttgagctgaatcaggatctcgaccggttcgtgcggcagttcggcgcgctgggtggcttcaatggcgttatccagcagattaccgatgatagagataagctcggactccatcaacgacggcagcgggcggtcgatgcggcaggccgggtcaaagctcagctcaacccctttttcccgcgcgcgggcggctttacccagcagcaggccgcacagcgtcggcgaattaaagtgcgatgaaataaagtccagcagctcctgggcatgctccgactgcgcctgaatatagcgaatcgcctcatcatagtggcccatatgcagcaggccggagagggtcgtcatccggttgagctgttcatggcgcatgatgcgcagattatcaacgtagcgttttacctggctgagctgggcgctcagggagttgatttcatcgcggtcgcggaaggtgatcacccagccctggagcgcattctccagcatgattcgcacccggctggcgagtaccgtcagctgattaaaacggcacagctcgtcgtgggtatcgctttcgaacatctctccgccggcgaaaaacggctgcggcgtaatgacgctatcgatagacttaccgcgcagctggtgcgcgggctggctcagtccgagcaggctgcgggcggcgtggtttatcacttcaatacgccggtgatggtcaatcacaatcaccccttcgtatatcgactccatcatcgctttttgctgacgtaccagcaggccgatttcgcgcggctccagcgagaaaatttgtttcttaatgctgcgggtgaagtaccaggagaagataaacagcgcgataagcagcagcaccgcggcgatgaaaatattgatgacttttgccagcgtgatgctgtcgagatagctggtgaggtagccgacggagacaatgccaacgacccgacccgcgtcatcgaaaatgggcgctttgctgcgcagggaaataccgagtccccctttgcggatggtggtcgtgcttttcccctcaagtaccggctggttatcgccgccaaccagccgcgtgccgacccactccggatggacagagtgaaacagatgcacgccccgcttatcgccaatgacgataaaactggcgtcgctgtgggcggcgatattttgcataaaaggctttgtcgccagcgcgtcttcacgcgccacctgctgacgtaaatccggcatcagcgcgatttcttctgcctgtattttcgcgcgggcgctcatttcctgataaagctgatggctggcgtcgaaatagtaatacacgcccagcagcgcaaacagcactgagaaaaaagcgaccagcgaaatgaacagcttaaactgaaatgaaaccttcataagtataatgcacagtatcagggatacggcagcgtatcattttttcgctgccggcatcgtggctgagggaaaccggtgaacgtcacaagagcgtccgggaaccacaattatccgctggcggggaatttatcaaggttaatcaggcgctggatttaaaaaccttaaaaaccacggcaataaatcagagcggtttcacaataataatagaaaccataaaaaccatagtgaccattaaaacttcttttttaatctgccgatcctcacattaactccgcacgtggccctctaacctgaaaagtaataataaccagagggcttaattatgagcaccacagacaatgcattctctgcaaccatcgaccctattaatacgccgaaacccgcgcttaagcagcgctggtggcatatcctcgataactggaaagtcggtattatcccgctgccgctctttttgctggccggcggcctgatcgcgctggactgcctgggcggcaagctgccgagcgatatcgtcgtgatggtagcgacgctggcctttttcggttttgcctgcggcgaattcggtaaacggctgccggtactcggcaagctcggcgcggcggccatctgcgcgaccttcatcccttctgcgctggtgcattacggcctgctgccggaggtggtggtggagtcgaccaccaaattctataagtcgaccaacattctttatctttatatctgctgcattatcgtcggcagcattatgagcatgaaccgcaccacgctgattcagggttttctgcggattttcttcccgatgctgtgcggcgaaatcgtcggcatggtggtcggcgtcggcgtcggtaccgcgctggggctggagccgtttcaggtgttcttctttatcgtcctgccgatcatggccggtggcgttggcgagggggcgatcccgctgtcgattggctacgccgcgctgatgcatatggatcagggcgtggcgcttgggcgcgtgctgccaatggtaatgctgggcagcctgacggcgatcgttatctccggctgtttgaaccaactgggcaagcgtttcccgcatttgaccggggaggggcagctgatgccgaaccgccgcaacgagacgcatcgcgaaacgcccgccgagggcaaaatggacgtgacaacgctggcctccggcgcgctgctggcggtgctgctttatatgctgggtatgctggggcagaagaccatcggcctgcccgcgccggtgggcatgctgttcctcgcggtgctgctgaagctggtgaacggcgtctctccgcgcctgcaggaaggttcgcagatggtgtataagttcttccgcacggcggtcacctatccgattctgtttgccgtcggcgtggcgatcaccccatggcaggagctggtcaacgcctttaccgtgaccaatttgctggtgattatcagcaccgtaacggcgctggtggcgaccggtttcctggtcggcaaaaagattggcatgtacccgattgacgtggcgattgtctcctgctgccagagcggtcagggcggtaccggcgacgtggcgattctgacctccggcaaccgcatgaacctgatgccgttcgcgcagatcgcaacccggatcggcggcgcgattaatgtttcgctgggtctgctgttcctcagtcactttctggcctgatttaacttttttataaccgctaagtctgctttttcgtgctaaatggcgcagaaaatatctgcgccccgtctccaaaacagggatcgtttagcgatacaatcagcgccattattcgcgactgcgacggcagcctgtccgctgccttttattaagtgaggagagaaacaaatgtcagtggatactctcgcccgtgagggcgtaagcatggaagcgctgctggcggcgaaagagcagcgcgccgcgcgccaggccgactggttagcccattatcagcggccggtgatttcgctgaccctggtgacgccgggcgcggtgaaagacagcattcgctaccgtaatatgatgggggtggcgctgcaggcctgcgatcagatgctgtggaaacaccgctggcagacgctggatcgccaggtgctgtggctgccgaccgggccggaagcgctgtggtgcgtcgatcacgccgccagtgaaatcaaagccttctgtaccgatcttgagcatacccatccgctgggccgcctgtgggatattgacgtcatttgcccgaaaaatggcctggttggccgtcagtcaatgggggagaaccagcgccgctgcctgctgtgcgacgagcccgcgcacgcctgcgcgcgcagccgccgtcatgacaccgggcaggttgtggcccgcgttgagcagatgattgatgcgtggtttgcccgcgactgacgcccgttttccgcggcattgatgagcgaggagttgcccgggtgagccgctggcggcacgacccgggacagagaggtacggtcagaagtcgatcggcgcgcgaaacgtcatcgtattaccgaaagcggggtgggtgatggtcagcgtttcggcgtgcagcagcagacgcggcgccaaggccagcgcttccggcgacgcataaaagcggtcgccaagaatcggatggcccagcgccagcatatgcacgcgcagctgatgcgaacgcccggtaatcggcttcaggcgcacgcgggcggtgttgtccgccgccaactccagcacttcatactcggtttgcgccgctttgccggtttcgtaacacaccttctgctttggccggttcggccagtcgcaaatcagcggtaaatccaccagaccctcggttttctccggatgcccccagacgcgggcgacgtactgctttttcggctcccgttcgcggaactgccgcttcagctcgcgctctgccgctttggtcagggccaccacaatcacgccgctggtcgccatatccagccggtgcaccgactcggcctgcgggaagtcgcgctgaacgcgcgccatcacgctgtctttgtgctcggcaagccggcccggcacggacaacaggccgcttggcttgttgaccaccataatgtgctcatcctggtagaggataaccagccagggatcctgcggcggattgtagttttccatcgccatattcgcgttccgttactggtgggtgaccacgattaagcgcagcgcatccaggcgccagcccgcctgcgccagcgcgtccataacctgctgacggttgctctcgatagccgtcagttcatcatcgcggatgttcgggttcacggcgcgcagcgcttcaaggcgcgacagctcggccgtcagcttatcgtcggcttctttacgcgcggcgtcgatcagcgcctgggccgctttggctacctgcccttcgccctgctgtaaaatcgcgtggacgtcctgctggacggcgttgaccagcttgctgccggtgtggcggttaaccgcgctcagctgacggttgaagctttcgaactccacctgaccggcgaggttgttgccgtttttgtcgagcagcatgcgcaccggcgtcggcggcaggaagcggttgagctgcagatgcttcggcgcctgcgcttcaacgacgtaaatcagctccagcagcagagtacctaccggcagcgctttattcttcagcagcgaaatggtgctgctgccggtatcgccggagaggatcagatccagaccgttgataatcagcggatgctcccaggtgatgaactgcgcgtcttcgcgggacagggcgacgtcacgctcaaaggtaatggtgcagccatcttccggcaggcccgggaaatccgggaccagcatatggtcggagggggtcaggacaatcagattctcaccgcgatcgtcctggttgatgccgacgatatcaaacaggttcatggagaaggcgatcaggctggtgtcgtcatcctgttcttcaatgctttccgcaagctgctgggctttttctccgccgttggagtggatctccagcagacggtcgcggccctgttccagctgcgctttcagcgcttcatgctgctggcggcaggctttgatcaggtcgtcgaagccgtcggtattttccggcgtggcaagatagttgatcagttcgttatgcacgctgtcgtagacggtacggccggtcgggcaggtgtgctcgaacgcgtccaggccttcgtgataccagcgcaccagcaccgactgggcggttctttccagatagggaacgtggatctgaatatcgtgagcctggccgatacggtcaagacggccgatacgctgctccagcagatccgggttgaacggcaggtcgaacatcaccagattgctggcgaactggaagttgcggccttcggagccgatctcagaacacagcagcacctgagcgccggtatcttcctcggcgaaccaggcggcggcgcggtcgcgttcgataatcgacatcccttcgtggaacaccgcggcgcgaatgccttcgcgctcgcgcaggacctgctccagctgcagcgcggtggccgctttggcgcagatgaccagcactttctgcgagcggtggctggtgagatggcccatcagccattcaacgcgcggatcgaagttccaccaggtgccggtatcgccttcaaattcctgataaatttgctccggatagagcatgtcgcgggcgcgctcttcggcggttttgcgggcgcccataatgccggaaaccttaatggccgtctggtactgggtcggcagcggcagacgaatcgtatgcagctcgcgtttcgggaaacctttgacgccgttacgggtgttgcggaacagcacgcggctggtgccgtggcggtccatcagcatcgacaccagctcctgacgagcggcctgggcatcatcgcgatcgctgttggcggcctgcaataatggttcaatatcctgttcgccgatcagatcgctcagcgcgttcagatcggcgtcgctcagcttattaccggccagcagcagggcgaccgcgtcggcaaccggacggtagttctgctgctcttcaacaaactgggcgaagtcgtggaaacggttggggtcgagcaggcgcaggcgggcgaagtggctctccattcccagctgctccggcgtcgcggtgagcagcagaatgcccggcacgcattcggccagctgttcaatcgcctgatattcccggctcggggcgtcttcgctccagaccaggtggtgcgcttcatcaacgaccatcagatcccattcggcttcgcacaggtgttccaggcgctgcttgctgcggcgcacgaaatccagcgaacagatcaccagctgttcggtttcgaacgggttaatcgcgtcgtgctgcgcttcggcatagcgctcatcgtcaaacagcgagaagcgcaggttaaagcggcgcagcatttccaccagccactggtgctgcagggtttccgggacgacgatcaggacgcgttccgcggcgccggagagcaactgctgatgcaggatcatcccggcttcaatggttttacctaaacctacttcatccgccagcaggacgcgcggcgcgtggcggcggccaacgtcgtgggcgatattcagctgatgcgggatcaggctggtgcgctggccgcgcaggccgctccacggcatgcggtactgttcgctctggaatttacgcgctcgatagcgcagggcgaaacgatccatacggtcgatctgtccggcgaacagacggtcctgcggtttgctgaagaccagcttgctgtcgaggagcacttcacgcagggtaacgttggcttcctgggtatcgaggcgggtgccggtgtaggccagcagaccgttctcttcattaacttcgtcaacctggagttgccagccttcgtggctggtgatggtatcgcccgggttaaacatcacgcgggtgattggggagtcgttgcgtgcgtacagacggttttcgccgatggcggggaaaagcagggtcaccatgcgcgcgtccagcgcaacgaccgtccctaatcccagttcgctctctgtgtcgctaatccagcgttgaccaagtgtaaaaggcatatatgttcggctctttagttctttgattgcaggcaatagttgagcatctccatggagaatcggagatacgtcaaaattgggtccaggaatggaaagggcgctatattactggatggcggaacgttcgtcacgtcctcctcacccttcattttgcggcttttgcgccagcggaatgagtgagaaaaaatcaaaatagccccagctgccccgtcactattgtagcaaaatcgtcgtcgacaaagggaagtattccttcggcgacaggctctaattgcttagaaagatagtgttcataatccagcggtgactgctgataatccaccggctccggcccgccggtagtccagacgtatttaatgctgccgcgctgctgatactgctgcggcctgcccagcctgacgttttgctcatcagcgagcctggccgcgcgcacgtgcggcggcacgttgcgctgatactccgccagcggacggcgcaggcgcttgcggtagaccagccgatcgtcaagctcgccgttcatcagcttatcaatggtttcgcgcacgtaatcgcgatagggctgatggcggaaaatgcgcagataaagctcctgctgaaactgctgggccagcggcgtccagtcggtgcgtaccgtctccagccctttaaacaccatgcgctgctcgctgccttcctgaatcatcccggcgtagcgctttttactgccggtatccgcgccgcgaatggtgggcatgagaaagcggcagaagtgggtttcgaactccagctcgagggtgctgacaagcccctctttgctcagctccgccgcccaccattcgttgacgaaggccaccagcgagcggccgatgctgctggcttcctcttcgctgtgggatcgcttgagccacacgaaggtggagtcggtatcgccgtagataacgtcatagccctgggattcaatcagcgctttggtctggcgcataatcgcgtggccgcgcatggtgatggatgaggccagacgcggatcgaaaaagcggcaggcgctggtaccgagcacgccgtagaaggcgttcataatgattttcagcgcctgcgacagcggtttgtttttatgctgcttggcctcgtcgcgcccgtgccagatttgcccgacgatccccggcaggcagtgtctttctcgcgagaagcgcgcgccgagaaagccttcggtgctgtgggcgtcatcgggctgcgccagaccttccaccagccctaccgggtcgatcagaaaggtgcggataatcgacgggtacaggcttttgtagtccagcaccagcaccgagtcgtagaggccggggcgggagtccatcacgtagccgccggggctggcctgcggcggcacttcaccgaggttcggcgcgacgtagccgagccggtgcatgcgcgggaaatagagatggctgaaggcggcgaccgaaccgccgtggcgatccgcgggcaggccgttgaccgtcgcgcgctccagcaaaaacggcatgatctcggttttatggaagatgcgcgtgaccagctcgcagtcctgcaggttataggtggccagcgccggtttatcctggtgaaagcggcgatcgatttcatccatccgatcccaaggattatcaatggccttgccctcgccgagcagctcgcgggcgaccgactccagcgcaaaagaggagaagttccagaacgcggatttcagcgcctcgatgccatcgataatcaggcggccgttggcctgagcaaagaagacgccattcttaaaaccgtgttcgcgccactccagttcgctgttgccgcggccgagcagcagcgggatgcgatagcgctcggcgtgcttttgcaggacgcgtaaatcaaactgcaccacgttccagccgatcagcacgtccgggtcgtgggcggcaaaccaggcgttaagcttttccagcagcagcgggcggctggcgacgtactccagttcgaaatcgacggcaggcggggtggccggttccggccctaacatatagacgacccgctggccgcagccttcaaggccgatgcagtagagctcgccgtggcggctggtttcgatgtccagcgacacccactttaggggcggccggtagtggggattgggcttcatccgcgcgttgaccagccgctgaccgcgcgactcgccttcaacccacaccggggcggtgataaagcgctccatcagatagcgctccggcgggcgaacgtcgccttcatataccgtgacgccgttttcgcgcagctttttttccagccgcatcagctggcggtgagcgcggcagtagagaccaaacacccgctggcgatgaaaatcttgcagagtgagcgcagcaaggcgatggccgttttcgccctgcagcaggcgttcagcctgcgggcgctgcgattcgggaatgaacgcgacggattcctgcggcggcagggtgacctcaagcgggccgtcatcggtcgccagccagaatgtcagttcggtgccctgcggggtatcccgccagtgacgggtgagtaaaaaacctgctcgtggctgcgtcacgccgtgctctcatcagtaaaaaccaggcctgattatagcctggttcaccaaatgatgctggggttttatacaggtgtggcgcgctgtttcccggacttagccgggctaccagcctgtagccccgctaagcgcagcgcgagccgggaatgctgcggccttactgcccgtaataggctttcgcgccgtgcttgcgcagatagtgtttatccagcagcgtttgctgcatctccggcagctgcggcgccagctggcggcagaagatgcccatataggcgatctcttccagcacgatagcgttatgcaccgcgtcttcggcgtttttcccccaggcaaacgggccgtgcgagtgcaccagcacgccgggcatttgcgccggatcgatacctttttcacggaaggtttcaacgatcacttcgccggtttgccactcgtactcgccgttgatctcatcgtcggtcatcaaacgggtacaggggaccgcgccgtagaaatagtcggcgtgggtggtgccggtagcgggaatcgactgtccggcctgcgcccagatggtggcgtgacgcgaatgggtatgaacaatgccgcccagcgtcgggaatgcctgatacagcagacggtgggttggcgtatccgaagagggctttttcttgccttccaccacgtcgccggtctccaggctgaccaccaccatatcctcggcggtcatgacgctgtagtcgacgccggagggtttaatcaccagcacgccccgttcacggtcgacggcgctgacgttgccccaggtgagggtaaccagattgtgctttggcagggccaggttggcttcgagaacctggcgtttaagatcttctaacatactgtgctccgaattgctggcgagtcagttcccctcacccgcaccctcagggagagggtgaggggacggcccttagcgttttgaaccgtaatacacttcgttccagcgcagcgcgtccttgaaggagggcagacgggtttcgttatcaatcacggtcagctcgatatcctgcagctcggcaaactggcgcatatcgtcgagggtgagcgcatggctgaagacggtgtggtgcgcgccgccggcgatgatccaggcttcggacgcggtgcgcagatccggatgcgctttccacaaggcgttggccaccggcagcttcggcagttcgtgcggcgttttcaccgtttcaatggtgttcaccagcagacgatagcgatcgccgagatcgatcaggctggcgacgatcgccgggccggtctgggtgttaaagatgatgcgcgccggatcggctttcccgccgatgcccagcggctgcacgtcgagaatcggtttttcaggggtggcgatggtcgggcagacttccagcatatgcgagcccaacgccagatcgttgcctttctcgaagtggtaggtgtaatcctccataaaggaggtgccgccctgcagaccggttgccatcaccttcatgatgcgaagcagagcggcggttttccagtcgccctcgcccgcaaagccgtagccctgctgcatcagacgctgcacggcgagacccggaagctgtttcaggccgtgtaaatcttcaaaggtggtggtgaacgcgtggaagccgccctgttccaggaagcgcttcatccccagctcaatgcgcgcggcatcgagaaggttctgccgcttatcgccgtggatttgcaccgcgggggtcaggcgatagctgctttcatactcatccaccagggcgctgatttcaccgtcggtgaccgcattgacgacctgcaccagatcgcccaccgcccaggtgttaaccgagaagccaaacttaatctgcgcggcgactttatccccgtcggtgaccgccacttcgcgcatgttatcgccgaaacggcacactttcaggtggcgggtatcctgtttagagaccgcctggcgcatccacgcgccgatgcgctgatgggcttctttatcctgccagtggccggtcaccacgctgtgctgctgacgcatgcgggcgccgatgaagccaaattcgcggccgccgtgggcggtctggttcaggttcataaagtccatatcgatgctgtcccacggcagggccgcgttgaactgggtatggaactgcatcagcggtttattcaggatcgtgaggccattgatccacattttcgccggcgagaaggtatgcagccacaccaccatcccggcgcacttatcatcgtagtttgcgtcgcggcagatatgggtgatctcatccggcgtggtacccagcggcttaagcaccagtttgcacggcagtttggcttccgcattcaggctgttcaccacatgttctgcgtgctttgtcacctgacgtagcgcttcagggccgtacagatgctggctaccgataacgaaccacacttcatagttattaaaaatcgtcattttcatgtccttaatgggtgagggctgcctgagattgcggcgcggattccgcttttgcagtcgaagggagataacgttgttccgcgctgagcgaccactgctggtagcgctgatagagttgttcgaagcgttgcgcctgcgccggacgaggctgcagggtactttccacctggctggccatgttttcctgcgcggcagggatatcgcggtatacgccggcggcaacggcggcgaagatagccgcgcccagggcgcagcactgatcggacgcgacgatttgcagcgggcgattcagcacatcgcagcaggcctgcatgatcaccgggtttttgcgcgcgatgccgccgagcgccatcacgttattgaccgggatcccctgttcggtgaagcactccataatggcgcgggcgccaaaagcggtggcggcaatcagtccgccgaacagcgccggggcgtcggtggcgaggttcagatcggtaatgacccctttcagacgctggttggcattcggcgtacggcggccgttaaaccagtccagcaccaccggcaggtggtcaagagacggattttttgcccatgcgtcggtcagcgcgggcagcagctgtttctggctggctttgatctgctctttgagttccgggtgggcctgcgccagctgctccagcggccagccgagaatgcggccaaaccaggcgtagatgtcgccaaaagcggattgccccgcttccataccgataaagtcaggcacgacgctgccgtcgacctggccgcaaatcccttgcaccgtgcgctcgccaacgctctgtttatcggcgatcagaatgtcgcaggtggaggtgccgataactttgaccagcgcgtttggctgcgcaccggcgccgacggcgcccatatggcagtcgaatgcgccgccggagatggcgacggtttgcggcaggcccaggcgcgcggcccattcggcggtgagcgtgccgaccgggatatccgcagtccaggtatcgctgaacatcgggtaggccaggctctggttgattatcgggtcgagttcatcgaagaaaccggcaggcggcagtccgccccagctttcatgccaaagggatttgtgcccggcgctgcagcggccgcgacgaatatcctgcgggcgggtggtcccggaaagcagggccggcacccagtcgcacagctcaatccacgacgcggcggcctcggcgacggcgctgtcctggcgggtcacgtggaggatcttggcccagaaccattcgctggagtagataccgccgatatagcgggagtaatcctctttgcccggctggtgacacaggcgggtaatctcctccgcctcctccaccgcggtatggtccttccacagcacgaacatggcgttggggttgctggcgaactcgtcgcgcagcgccagcacgttgccgtcggcgtcgatgggcgcgggggtggagccggtgctgtcaacgccgatacccaccacggcagcgcgctgttcggcgctaagcgcggcgaggacgcttttcagcgcggcttccattgattcgatatagtcgcgtggatgatggcggaactggttgttcggaccatcgcaaaatagcccctcctgccagcgcggataccactcgacgcctgcggcgagctcttcgccggtcgcgcactctaccgccagggcgcgtactgaatcactgccaaaatcgaggccaatcgcaattgccatactgttactccatgctaaaaatcattcatggtgaaacagtagatatctgggctgaaaaccgtcaggccgtattcgctaatcttatggactatattgctgtgacgtcgcaaagtgtgacgccgtgcaaatattcaatgtggactttcctgccgtctttatagacacttcagttatgcgctgaaagcgcctgaactgtgcgccgtgctcagtttttatcgagaagaggcgggttttaattcattttctaacccgcgtcgcagcatgagcgaccagccagaggataaaatacaaggtatggacaattggtgtccttaatgtctcctggagagcagagtttatggccgaaacgcaaaacgatcctttgttgccgggttactcttttaacgcccatctggtgacgggcctgacgccaattgaagccgatggctatcttgatttctttattgaccgtccgctgggcatgaagggctatatccttaatctgacgattcgcggcgaaggtgtgatcaataaccacggggagcagtttatctgccggcctggcgatatgctgctgttcccgccgggagagattcaccattatggccgccatcccgatgcccgcgagtggtatcaccagtgggtctatttccggccgcgcgcctactggcatgaatggcttaactggccaacgatttttgcccagaccggctttttccgcccggatgagcagtggcaggcgcgctttggcgaactgttcgggcagattgtggaggccgggcagggcgccgggcgttactccgagctgctggcgatcaatcttatggagcagctgctgctcaggcgcatggaagctatcaacgaatcgctgcatccgccgctggataaccgggtgcgcgatgcctgccagtacatcagcgatcatctggcggacagccatttcgatattgccagcgtcgcccagcacgtgtgcctgtcgccgtcgcgcctgtcgcatctgttccgccagcagctggggatcagcgtactggggtggcgggaggatcagcgcattagccaggccaagctgctgctgagcacgacgcggatgccgatcgcgaccgttggccgtaacgtcggttttgaggaccagctctacttttcgcgcgtgtttaagaaatgcaccggcgccagcccgagcgagtttcgcgcagggtgtgaataaaaagtaaagaaagtgaaatgatggcccggatttttaacacagccagtaaactatacaaacaaatgatggcttgacgaagtatgaacggctccggagaatccgtgcttcgtttttaaaccgggtacattatgcaagcattgctggaacactttattactcaatccacggtctattctctgatagccgttctgctggtcgccttcctcgagtcgctggcgctggtggggcttatcttaccgggaacggtgatgatggccggattgggggcgctgatcggcagcggcgaggttaacttctggcaggcgtggctggcggggattatcggctgtttgctcggcgactggatttcattctggcttggctggcggtttaaaaagccgctgcatcgctggtcttttttgaagaaaaacaaagcgctgctggataaaaccgaacatgcgctgcatcagcacagcatgtttacgattctgattggccgctttgtcgggcccacgcgtccgctggtgccgatggtcgccggaatgctcgatctgccggtcgcgaagttcatcccgccgaatatcatcggctgcctgctgtggccgccgctctacttcttaccgggaatccttgccggggcggccattgatatcccggccgatgagaatagcgccagctttaagtggctgctgctgggggcggcactgctggcgtggctggcggcgtggctatgctggcggctgtggcgcagcgccaaaagcgctggcgatcgtctcacccggtttctgccgcgttcgcgcctgctgtggctcgctccgctcatggtgtgcgccgccggcgcggcgctggtgtttgccttccgtcatccgctgatgccggtctatctcgacatcctgcataaggttattttgcgctaattcccagcagcgccgaggcgctgctgttgccgctgagcagcgcggcggtcgcgccatcccaggcaatgcgtccctcagccacgaccaccgaccgcggcgcgatgcgcgccgcatcttccacgctgtgcgagaccatcagcagcgtcagctgccgctgctggcagacatcggcaaccagcgtcagcatctccagcctcagcgcgggatcgagcgccgagaagggctcatccagcagcagtaccggctgctggcgcaccagacagcgcgccagcgccgcacgctggcgctggccgccggaaagctcgcccggcagccgctctaacatcgcgtcaatccccatctgtccggcaatcgcctgcagatgggcggattgatccgcgttcagcttgagccccggatgcattcccagcgcaatgttctggcggatggtgagatggttgaacagattattttcctgaaacagcatcgataccggacgacgcgcgggcggcgtgtgggtatggggctggccgtcgagcgcgatactgccgctggcgggcgttaaaaaaccggcaatcaggttcagcagcgtgctttttccggccccgctcgggccaagaaccgcgatgcgctcaccgcgttcgacggaaagcgtaaaacgcatcggcagatgctggtaaagccaggtcacatcattcagttttagcatcgcgtcccggaagtttttcaatcacgctaaagagtaaaaagcacagcagcagaagcagaagggcggtcacggcgccgtcctggctacggtaagaaccaatttgctgatacagataaaagggcagcgtacggaaatcttcgttgccgaacagcgccacgacgccgaaatcgccaatcgatagcacgcaggcgaaggccagcgcctgggccagcggccgctttaaagcgcgaagctcaaccacccgaaggcgggtgaagccgtgcatccccagcgactggcagagggtgccgtagcgggcggcgatatcgcgcatcggattttccagtaccttgagcgcataggggattgccatcagcgcattggtgaaaatcacgataccgtcggcggactcgggcaggcccacgctgttattgagcaacaggaagaaaccggtggccagcacgatgcccggcatggcgaggatcagcatcccgctcagctcaagcgcctgaccggccagagggtgacggcgggcgcgaagctcgcggctgctccagagcagcatcatggtaaggatgacgcttaagagcccggcggcaagcgcgatacgcagcgacgtccacagcgcctgccacagcgccggctgatgcagcacgctcagcagattgctgttcagcccgtcgcctatcaccgccagcagcggcggcagcagcagtaaaagcgccgcgccaatcagcgccgcgtcgcacagccggctgtacagccggtcgtcgggatcgcgccagccgcgaatatggctggccccgatggcgagggctttactcaggcgctggctaagcagcaccagcccgaggcagcagaccatctggataagcgccagcatcgccgcgcgcgccgggtcgtagtcgaaattaagggcctggtaaatcgccagttcgatggtggtcgcccgcgggccgccgcccagcgacagcacggtcgcaaagctggcgaaacagagcataaagatcagcgccgcgaccggtggaatttgccggcgcagccacggccactcgaccagccggaagaagacgtagccgcgcatgccgagctgggcggcgatttgccgctgttcgccggggatattttccagcgtctgcagcagcaggcgcgtggccatcggcatattaaagaatacgtgcgccagcaggatcccctgtagcccgtagggcgtgaattcccactgccagccaaaaacgtggcatagctgggccagccagccctgacgaccgtagacgctaagaatgccgaagaccgccaccagtaccggcagaattaaggtcatcgcgcaaaggcgcagcagcagcgtgcgccctgggaagcgacgccggtacagggcgcgggcgaggaatatcgccggtagcaccgaaaaaagcgcggaaaggaaggcctgccagaaggagaaacgcaccacgtgccagagatagctgtcgcggataagcgcgttccaggaggtctccggagcgctgaaccatagcgccagaaaggcggccagcgccacgacgaccagcacgatggccgccgtgagtcccggcaggagccagccgaaagctagcggctgacggcgcgttgccatgcgctaatccagttctgacgttcggcggccacctgttgcggtgtgaattcgagggtcgtttgcggtttcatcagcgcgtcaaagcctgccggaagcgcaaccgtcgtcaccggatacatccagttgccggtggggatcgcgttctggaagcccggcgataccataaatttaaggaacttttccgccagctccggctgtttgctggccgcggtgcgggcggctacctcaacctgcaggtagtggccttcagcgaagtttgccgcggcgtagttatcttttttctcttcgataatgtggtaagccggggaggtggtgtagctcagcaccagatcgctttcgcctttcaggaacaggccgtaggcttcgctccagcccttggtaacggtaacggttttcgccgccagcttctgccaggcttccggcgctttattgccgtagactttttgcatccacagcagcaggcccaggcccggcgtactggtgcgcggatcttcataaatcacccgccatttttgctcgccctcaaccagctctttcaggcttttcggcggatttttcagcttgtttttatcgtaaacaaaggcgaagtagccgtaatcgaacggcacgaaggtgtcgttgtcccagccgccgggcacgctgaccgcgctggccgggacgccgcttttggcgaacagcttgctttgcaaagcggcttccagcaggttgttatccagccccagcaccacgtcggctttgctgtttttgccttccattcgcaggcggttgagcagcgagacgccatcttccagcgccacgaacttcagctcgcagccgcagtcggcttcaaaggcttttttaaccgccgggcccgggccccagtcggcggagaacgagtcgtaggtataaacggtgagcagcggtttggcaaaaacgggcgcggcgaccagcgccagcagggggagtaattttttcaacactttgcacctcagaaaaaggggtggcaaaggattttgagagggcctcaaatcccttcgccggcgttatccggatcaggttcgacgggtattttctcagcccatacgctttatcttcgggttgcttctgcgctaaccgcgcgttgaggcaacttgaatgagattgcgtatgtttattagcaccccgttgagaacggcagttagtgtaatgattttgtttgccaacggaaagcattacggctccggcggcgcgaaccacgcggacttaaagtcaaaccagccgagcgtgttcatgcgtacgccgcgcatgctgcgctgcccctggatcatcagccagtggtggatcagcggcaccacggtttgattggccaacagctgctgactccaggtggccgggttcagctcgcccgcgcgccagcgagcggcgtcctgttcccagtcgatggggatacagttgcgaatcagcggaacttcatacagccaggcaaacagggagaaatcgatcggcagcgtaaagttggcgctgttgagccatacgtcgctgaccacctccccgcggtgccactcctgatactccagctcctggatctccagtttaacctgatgctcggccagcagcgttgccatgatcccgcccatcacgcgatgctcgacgtgatcctggtagtaggtcagcctgaccgtctcaaggccggcaggcttctcgcaggcgtggctgcgcgcatgatgccagcggggcagcaggccatacgccgggaaccagttgccctgatagtgctcgcccgcgtgatagagcaggttagcgggctggaacacatagcttagccactggcgtaccgcgctgttaccgcccagcgggctgcgggcgtcgaacagcaggtaataacacccctcttccaggcggctttccaccgctttttcgctttgcgtggtgccctgtaacgtcaacccgccgttgggttcttcgctgatttccggcaggacccagacgttcacttcatcgatcagcgcccggtagccgaaatagtcatcgaaggcgtgaattttgagctgattctggttattacgcacaaccgagtagggcccggtccccacggggatactggagaaattctccatcgttcgccactcatgcgggaggatcatggccgggacctggcttaacaaccacggcagccagcggtcgggctggcggagatgaatgtcgagggtccatgcggtgggagagtcgatgcgctcgatatgagagaacagcggcagggcgttgctgcgctgcagagaggtaatgacatcttccatctccagctctcgtccatgatgaaaatgaatccccggacgcagaaaaaagcgccagtgggtgggggcgatctgctgccaatggtgagcaatatcggcctccagttccccattttcctcatttacccgcgtcagggcgctaaaaatctgccgggcaatatgcgtttccgagcggcgcagcgcgctgccgggcagcagatttttcatcggccgatagtagagcacgcgcaggatatgccggccctgacgaaagctgcggcctaaatgggaaaccagcatttgccggacggcggctttatcgccaaccagctgcaccagctgatcgattctgtcctgatccagcagatcttccgccctctgctgctgcagggcgagaccggtatagagaaaagagaggcgggagcgcttgccgcgcccggcctccgcctcccaggtcagccagccgcgcgcttccatcatgttgagcagggtacgcatatggcggcgcgagcagcttagcatctctgccagcgcattcagcgtggtctcctgcgacttgccatcgcagcactgccacaggcggatgaactgctgttgtaaacgaccggaagacataaaaggggaactcctgataaaaactcagcaatttattacttcctatattaagtcaataatcaacatcgatgaagcgaggaggtgaatatgatggggtcaaccatgaaacagttctaccaacgctacttttctgcgacgcaggatgcgtcctggctggcccgcctgatggcaggaagacagcagaaaatgctcggcgagctgatgcagtggggagttacgtcgcagacctcggatcattgacttgcagacatcatgtgtgactgagtattggtgttatactcgtcgtctttcaagctgcaggtgcgttggctgcgcccgctcgcccaggccacatagttatctatgtttccagtgacttacgttctggccgcctgcccgcaactcgaaatccatagagtatagaatcacccgccagcagaatacttctgctggcttttttcgttttcttcgcgtgcttaaggatatttcatgctgtggttaatgacgatggggcgtcgtctaaacggcgtttacgccgcttttatgcttgtcgctttcatgatggggatcgccggcgcgctgcaggcgccgacgctcagcttattcctcagccgcgaagtgggcgcgcagccgttctgggtaggactgttctatacggttaacgccattgccggcattctggtcagcctggcgctggctaaacgctccgacagccggggcgatcgccggcggctgattatgttttgctgcctgatggcggtgggaaacgcgctgctgttcgcttttaatcgccactatctgacgctgattacctgcggggttatgctggcctcggtggcgaatgccgcgatgccgcagctttttgccctggcgcgggaatatgccgatagctcggcgcgcgaagtggtgatgttcagttcgataatgcgtgcgcagctttcgctggcgtgggttattggtccaccgctggcttttatgctggcgctgaattatggcttcaccaccatgttttcgattgccgccgggatctttgttataagcctggcgctgatcgccgtcaaactgccctcggtcgcccgcgttgagcagccttcggaaggcgctgacgtgctggtgcaggccggaggatggcacgataaaaacgtgcggatgctgtttatcgcctccacgctgatgtggacctgcaataccatgtatatcattgatatgcctctgtggatcagcagcgatcttggcctgccggacagccttgcggggattttgatgggcaccgctgccgggctggagatcccggcgatgatactggcgggctactacgttaagcgctggggcaaacgcaagatgatggtgacagcggttgcggcgggcgtgctgttttatatcggtctgattctgttccacgaccgcgtggcgctgctggtgctacagctgtttaatgccgtatttatcgggattgttgccgggattggcatgctgtggtttcaggatctgatgcccggacgggcgggcgccgcgacgacgctgtttaccaacagtatttccaccggggtgattctggcgggggtgattcagggcgcgctgtcgcaaagctatggtcacgccagcgtctactggacgattgccgcaatttcgctggtgacgctgtttatgaccagcagggtgaaagatatctgaatcgccacccctgtcccggcaggatgccgggacaggggctggacaggttatttcaacacgatccttttaatatcgccgataataaaaacatacgcgataacgccaaccagcgcggttaaaccgatataaatcagcgcatagaaaaaattaccggtcatggatatgataaccccaataattaatggggtaataattgatgccatattagcacagaagttgaaaatgccgccggtcaatccgcccatattcttaggggcaatgtcagaaataagcgtccagccgaggccaaccataccctggccaaaaaatgcaatcgacataataataatgacagcggtgttgctatcgacccagttagcaatgatgatgcagctcgacagtagcagtccggaaataattggcagctttctgctaatatttactgagttggttttctttattattttatcggatacccaaccgccgaaaaagataccgatagccgcggccaggaacggccaggaggcgaagaaacccacgtgaagccaggggaggtggcgttcgttagccagataagtcgggaaccatgtcaggaagaaaaccagcgtggtgttaccggcaaattgaccaaggctggcgccgatgatttgccggcagcacagcagacgtttcgcatcatgccagttgaaagggatattttcattgacgcatgccgtattttctacgccgatatactccagctcttctttatttgccgtttttgattcatgtggctcgtgataaaacttccaccatacaaaagtaaacgcaatacccaacccaccggtcaggaaaaatagcgttctccagccatgatgctccagaattaaaaaaaggagcggagagaatgcggccaggccaatatattcaccgacggtgtaagtcgccgttgcccgggcgcgttcatgctgcggaaaccatttactgacgacacggctattaaccgggaaacagggggcttcgctgatgcctaagcctaaacgcagcagcagcagcgattttaggccgacagaaaagctttgcagtaaggtaaaggttgaccagaaaaaaatagaaagcgcgtaggtcagcttattgccgaagcgatcgagaaacatcccgccgggaatttgcgccagagcgtaggtccaggcgaaagcggaaaaaacgatccccatcatggccgggtcaatatctatttcgctcgttaacttgggcgcaacaatacctaaaatagtccgatcgagataatttatcatcgtccctatcgatagtaacattaaaattacaattcgcgttttagttcgcttttgcgtggccgacggcaaaatcggccgttcctgagcatcgatcgtcctcatagtgatttcctttaaagtttaaaatatttttgcatgaatttatgcaggcaaaaatattctatttgacgttgacgctatcgatgataagtcacgctttgttacggcttctgtgacatggcataacaatatttgatataaccccgatatttctccttttcggctcatcatcgatagcctgtatggtatattaggggcatgagttttattcttatattatacgagcaaaaataatgaacctaaagcaactttattattttaagcggctggcagaaaccgagcactacactgaagctgcctccagtctttttatcactcaaccctcgctaagccacgccatatctgaactggagaaagagcttggcgtggcgctatttgccaggaaagggcgtaatgtcaaaattacgcagaatggtaagcgctttctgccctacgtcgaagatgccctggcctcattagagaatggccgcatgacgttgcaaaaaaatagcgacgagaacaaggagaatattcgcattgcgtttatttacaccatgggcgaatatgttgttccgcagttaattaataaatattcactttcaccatctcgtcacaatgtgacattttcttttactcagggaacgtcgttaacgcttctgcaggaactgaaggccgggaaaagcgacctggcgatttgttcctatattgcggatgaacctgatatcgactttattcctattattcagcaggagctggtcgtggtgacggcaaaagatcaccctctggccaggctctatgaaaatgaagtcgacctggtggagactatccactatccctatatctatttttcagaaaatagcgggttacgcccctttattgataacgtgtttatgcagcaaaagctggtgccggatattgcctgctacgttgatgaggatacggcgatggcggggctggtcagtattgattacggtattgcgattatgccgcgaatttccgcgctctcgtattacaacgtgcatatcctgacgattaaaaatgcgattcctccgcgttatatctatctggcaacgatgaaagagcgggtactttctccggcgattcagtcatttaaagatgtcattattaatgacagccaaaaaatccgctagcaacatcgcccggagggtgacccccgggcgaagttttatcaggaaagaatatccatcagttcacgcagttgggtaatggcgatttgccctggcgcagaagcctggccgacggtaccgaaggtcattgctgaaccgaacaaacggccggttacccggctcacgccgccggatttacccatcgacatggtgattaacggccgagtcgcgtacttctctttcatcgtcagggttgccgagagcagggtcaggacatcctgcggcgactgcggcataaccgcgatcttcggcaggtcagcgccaagatcctgcatgcggcgcaggcggtagatgatatcttcctgagccggcgttttatggaaatcgtgattgctcatgataactttgacgcccgcagcgtgggcatcgctcaccagcgagcgaatttgcgcttcgtcattaaacagctcgatatcaatcacgtcggtcagaccgctaacggccgcctggcgattcagctcaaaataggcttcgtcgctgatttccgtttcgccaccctcttttttactgcggaaggtgaacagcagcgggatctctttcagcagctggcgaatctcgcccagcgccagtagtacctgctccgtttctctgacctgggtgaagtgatcgacgcgccactcgataatatcggctccggcggtagccagcgcgcgcgcgttagtctgcagctcggcgagcgttttgccgatcagcggtacgcagattaaggtttccccttcctggaaggtgatgttttttactgttactgcttgagtcatgttggtatccattattctttttgtcattgaccatcaggcggttgctgcaacccgggatgtttttgcagcggcgcgaacctgaagctgacgataaccgatgtacagggcgatcacaaagccgacgatcgcgatcagaagatcgaaccacataatgctggcaatacctatcttcgacagttttgccgtgatcagcgggatcgtaaagctggccagacttcctgcggtataaaagatcccggtggctttgccttttccgttcgggaagctcatggccataatggtcgcgcctatctgcagcacgccgccggcggcggcaaagccgatgataaaggcgaagccggtcactatcattggcgtagggaacaggcaaacgatcagcagtgacatcatcgacaggaaagtgtaaacgatcatggcgacggccgagctaaatacctctttgacaaaggccgcggtgacgaacacgcacgtcagggaaccggcagtatagacgctcaggagtttaatggccgactcgtgcgggatgccggcaacgaactcgccgtactgcgctaaccactggctgaccagataaaaagtcgccataccgatatagccgtacagggtaaagatggccatatccagcttgccggcgttcgcctgcggggcaacggcggcggccgacgatttttctgcggtttcctttttcgcccgatggtccgggaaaggcatttttatcaggtagatagcgctaataatcatcaatacggcggcgatgataaacgaccatccgtaccacatattcgcccaaatcagcgcaccgataatgaacggcagcaggaactgcccggcagagacaaaggctttgatcagcacatttgcccggctggcggagttagggaaggcttccatcagcgccggataggttccggaatcgaggaagctgtttgccagaccggccataatgccgaagaagtaggccatataaatgtttttcgtcagcagaataccgaggaaaaacaccagatagctggcgatgccgagatagataaaaggtttacggccaaaacggtcggacaggaatcctgtgacgatcgtggcgagcttaccgatcccgagcgacgaaatgacgatggagacgccggcagcgtcggtcccccactgttcctgcagattcgccatattgagggtgattaacaaaacccccatgccgtggatcaggtagttaagatagagcccagccgccgttgggacatatggatttttcatcgcgaccatccttagaacaggatacttttgatgtgttcaaccggcatttctttgcccgtccagatttcaaaagcgcgcgcgccttgccagagcatcatccccagaccgttgatggtgcggcagccttttttctcggccacttccagcagataagttttgcgcgggttgtagaccacgtcagacacgatcaggtccgggcgcaggaagctgtcgtcaggcagcagcatctggccttcaaacggtttcatgcccacgccggtggcgttagtcagaatgacgctgctgtcgatttccgcgcgcagtttgtcatgatcgtccagatcgaacaggtggatctcgcagttggtgttattacggattttggcgacggtctgttcggcattggcgaagaatttatctttgcggttaaagatggagatcgctttgacgccatcgagcgcggcctgaacgcagagcgcggttgccgcgccgccagcgcccagaacggtcatttttttgccgatgatatcaatgccctcttctttgagcgcgcgcatatagccggtgccatcggtaatgtggccggtcagtacgccattgtcgttcaccacggtattcaccgcgccaaccagttctgccgccggcgagagcttgtccagatactggcaaatctccgttttgttcggcatggagacgttacagccgcgcagttttaacgcgcgaaagccctgaacgacatctttcagcgtttcattacccacttcgaaggccaggtaaacgtagtccagccccagatgggcaaaggcttcgttatgcatggttggcgacatgctgtgacgaatcggggtcgcaatcaggccaatcagctcggtatgtccggtaatacgttctgccatgataaaatcctcaatatgttagaaatggaatttttgtcgattcgcggttgccgagagcccccatatcttcgagggtgtccagcacgttgcgcccttcgcgcacgccatcaatgattcgccgggccatcaggctgtcgccgatgttcattatttttacgttattggctctggcccattgttcaatctcagtgagaccggcggtgttggcgcgcattcccaggcagacgaagccgtaatcgaaaggaatgtcgaaggtgccatccgcatttttaacggtgaaatgcgtcggggtgacggcaaccagctgcgtgcgcatgtgctgttccacgtgatgttcatccagcatggtcaacatggcgtttttggtaatgatgtccagatcgcgacccggcgcgtcctgcatctcgataagcacggcgctggcaccgcgcgcggagaagtactcgataacgtccagacccacggcgcctgcgccgacgacggcgatgcgtttacctgtagcatcggcaaactggtccagatgatgaatcatgttggtaatggagaagacgttcccgccttcgacatcgatgttctcgcgcagtccttcaatgggcggcagcaggggcactgaaccggtggcgttgacgattaaatccgggcgaagagcggaaacggacgccacggtggcgcgtttgccgacctgcagcatcaggttatcgagcgaggcgatacggtttttcataaactgcggaaaatcagcgatacgctttttctccggcagcagggagatctcgctggccagtccgccgatgctgtgcttctcttccagcagccaggtatgacagccgacttcagccgcggtgcaggccgcttccattcccgccgtacccgcgccgatgaccacgacgttggtatcgcggatcacgcgctgctgcttatacgcgtcgccgtggatgatatccgggttgatcgagcagcgaagagggcgggagcgggcgatgcggtgatccgcgcagccaatgttgcaggagatgcatttccgcatcaaacgttcgttgccgctttgaactttttgcacccactccggctcggcgatcaggccgcggccaatggcaatcaggtcggcatcgccgctggcgataatatcttcggcgactttcggggtacggatgttgccggcaatcaccgtgggcttgtggaatttgtcgcgtaccgcacgcgagaggtagcgcttccagccatcttccagagacatctggtcaatctggaaattgaggttgtcgttttgcgcggcggagacgttgataatatccactttttcctggcacagttcgaggatccgcaaggagtcttcgagcgtatttccacctttcagaaagtcatcggcgctaatacgcaggctgaccggaaaacgcggacctacgcaggcccgaaccttatcgacgattaaggttaatattctggcgcgattctctacgctgccgccaaattcatcggtgcgcttattaaacagcggtgataaaaactggctaattaaataagagtggccggcgtgaatttccacgcagtcgaatccagcgcggcgaacgcgctccgccgcgtcaccaaatttatcgacggcatgatatatctcatcgtgcgtcatcgggcggggaatattcccgttctttttggacggcgtgctggaagaagacagcggcatttcgccgttcaggcgatacgcataggccgacgcgccggcgtggtttaattgaatactgacgcaggcgccgtgtttatgtaaggtttcggttaatttgaacaggcgcggaatatattgatcgttatcgatacgcagctgcgtagtgccgttagaggcgaaaggaaaatcgatgcaaatattctcgatagtgatgagtcctgtgccgccccgcgcgcgtagctcatagtagtcaatctgctcctgcgtgacttccccgttcaggctcgccaggttggtgcccattggcggcatgatgatgcggttttttattgtcattccgttaatggtcaacggggaaaaaagatggggatagtggctcatatgctctctccactggatgcctgatggccttttacggcgattctggcctgtccaaagttaatatttctctgtgggaaagataacgaggcgtttaatagaaaaataatgcttttttttgcgcggagctatagcgtgattctatgggattaacaatttatttacacattggtgtttttaccttaaatatttcaatcgattttttacttgtacttgtggaatgacacaaaaatagtaggggaatgattgaatagatgcccaattgataatgatttatttttatcgcggcaaaaatgtcgccccgtgatagcgacgaatattgatatatgtgcgccagatctcatttttaccggcgaaaaaaaagcccggatcgcggtccgggctgagatatacatggcggctgccttaattcataaaggccggctgttttttctcataggctgagatcgcctcttcatgctgcaaagtcaggccgatgctgtccagaccgttcagcatgcagtggcggcggaaagcgtcaattttaaagctgtaagatttatcgcctgctttaaccacttcggcttccagatcgacttcaaacttaatgcccggctgggagtggaccagcttaaacagctcatcgacctgcgcttcgctcagggtgaccggcagcagctgattgttaaagctgttgccgtagaagatatcggcgaagctcggcgcgatgacgactttaaaaccgtaatcggtcagcgcccacggcgcgtgctcgcgcgaagagccgcagccgaagttttcccgcgccagcaggatagaggcgcctttatattccgggaagttcagcacgaattccgggttaggctgttcgcctttgtcgtccaggaagcgccagtcgttaaacagatgggcgccaaaaccggtacgcgtgactttctgcaggaactgctttggaatgattgcatcggtatcgacgttcgcggcgtccagcggaaccaccaggccggtatgttgggtaaatttctctgccatgatggtttccttatttcaagctacggatatcggcgaaatgaccggtaacggccgccgcggctgccatggccgggctgaccaggtgagtacgcccgccgcggccctgacggccttcaaagttacggttgctggtggaggcgcagcgctcgcccgggttcaggcggtcgttgttcatcgccaggcacatggagcagccgggtaaacgccactcaaagccggcttcaataaagattttatccaggccttcggcttcggcctgcgcttttaccggaccagagcctggcacgaccagcgcctgaacgcccggcgcgactttgcggcctttagcgatttcggccgccgcgcgtaagtcttcgatacgcgagttggtgcaggagccgataaagactttatcaatcgccacgtcggttaacggtacgccagatttcaggcccatataggccagcgctttttccgcgctcgcgcgctctaccgggtcggtgaatgatgccggatccggaatgatgtcggtgacggagatgacctgacctgggttggtgccccaggtgacctgcggggcaatctcttccgcctgcagggtgacaacgctgtcaaaggtcgcgccatcatcggtggtcagggttgtccaccaggcgacggcttcgtcaaaatccttgcctttcggcgcgtgcagacggcctttcacgtaatcgaaggtggtctggtcaggcgcgaccaggcccgctttcgcgcccatttcgatagccatattgcacagggtcatacggccttccatgcttaaatcacggatggcttcgccgcaaaattcgacaacatgaccggtgccgccggcgctgccggttttaccgataatcgccagaacgatatctttggcggtgatgcccggagccgctttacctttgacttcgatcttcatggttttagcgcgaccctgcttcagcgtctgcgtagccaggacgtgttcgacttcagaggtgccgataccgaaggccagcgcgccgaatgcgccatgggttgccgtgtgtgagtcgccgcagacgatggtcatacccggcagggtgacgccctgttccggccccatcacgtggacgatgccctggaaagggtggttcagatcgtacagttccacgccgaactctttgcagtttttaattaactcctgcatctggatacgcgccatttcgccggacgcgttaatgtctttcgtctgcgtcgaaacgttgtgatccatcgtggcgaaggttttgcccggctgacgtaccgggcgtttgtgggcgcgcagaccgtcaaacgcctgcggcgaggtcacttcgtgaaccagatgacggtcaatatacagcagcggggtttcgttttgcgcttcataaaccacgtgagcatcaaacaacttttcgtataacgtcttcgccatgattacaccccttcagcgacatagcgggcaatgatatcgcccatttcatcggtactgaccgccgccgcgccgcgcgctaaatcgccggtacgtacgccttcttctaatgcgcggttgatcgcattttcaatcgcggttgccgcgttatcggcatccaggctatagcgcagcagcagcgccagggagaggatctgcgcgatggggttagcgatgtttttaccggcgatatccggcgcggagccgcctgcgggttcatataaaccaaagccttgctcgttgaggctggcggacggcagcatgcccattgaaccggtaatcatggcgcattcgtcagacaggatgtcgccgaaaagattggagcacagcaggacgtcaaactgggacggatctttgatcagctgcatggtggcgttgtcgatatacatatgcgacagctcaacgtcaggatactgcttactgacttcactaacgatttcacgccacaaaatagaagactgcagcacgttcgctttatcaatcgaggtcactttgtggcgacgcttgcgggcggactcgaacgcaatatgggcgatacgctcaatctcaaagcgatgatacacctcggtatcgaacgctttctcatgctggccgctgccttcacggcctttcggctggccgaagtaaatgccgccggtcagttcgcggacgcataaaatgtcgaagccgttagcggcgatatcggcgcgcagcgggcaaaactcttccaggccctggtacagcttagccgggcgcaggttgctgaataatttgaaatgcttacgcaggggcagcagcgcgccgcgctccggctgctccgcgggcggcaggtgctcccatttcggtccgccaacggagccaaacaggatcgcgtcggcctgttcgcagccttcgacggtagtctgcggcaggggagtgccctgacgatcgatggcgacaccgccgacgtcgtgctggctggtggtaatgcgcatatcaaaacggtggcgaacggcttccagtactttcatcgcctggttcatgacttccgggccaataccatcacctggtaaaacagcaatatggtaattcttcgacattacacggtttccttattgttctctttattctgagctttgcgttgcaattctttttcgacttcagcggcgcgccagatattgttcaggacgtgaaccatggctttcgcggaagattccacgatatccgtcgccagacccacgccgtggaagcggcggccgttgtagttcgccacgatgtccacctggcccagcgcatccttaccctgacccttggcgttgaggtcatatttgaccagctcaatctcatagccggtgatgcggttaatggcctgataaatggcgtccaccgggccgttaccgttggcggcctcagcttttgtttcatcaccgcaggccagcttcacggaggcggttgcgatatcgctggagccggactgcacgctgaagtaatccaggcggaaatgctccggttcttcctgctgtttattaatgaaggctaatgcttccaggtcatagtcaaatacctggccctttttatccgccagcttgaggaacgcgtcatacagatggtccatgttatagtcggtgtctttatagcccatctcttccatacggtgttttaccgccgcgcggccggagcgtgaggtcaggttcagctgcacctggttcagaccgatagattccggcgtcatgatttcgtagttttcgcgatttttcagcacgccgtcctggtgaataccggaagagtgggcaaaggcgccggttccgacgatagctttgttggcagggatcggcatattgcaaatctggctgacggtctggctggtacgccagatttcctggtgattaatgcgggtgtgcacattcataatgtctttgcgcactttaatcgccatgatcacttcttccagcgagcagttgccggcgcgttcgccgataccgttcatcgcgccttcaacctggcgagcgccggcgtggaccgctgcgagggcgttaccgaccgcgatgcctaagtcgtcatgggtatggacggagataatggctttgtcgatgttaggcacgcgttcgtacaaaccggtgatgatgttggcgaattcgaacggcatggtgtagccgacggtatccggaatattgatggttgttgcgcctgcattaatcgcggcttcaacgacgcgagccagatcggcaatcggcgtacggccagcgtcttcacaggaaaactcgacatcgtcagtgtagttgcgtgcgcgcttcaccatatagatggcacgttcaataacctcatccaggttactgcgcagcttggtggcgatatgcatcggcgaggtggcgataaaagtgtgaatacggaacgcttccgccacttttaatgattctgctgcaacatcgatatctttttctacgcagcgggccagggcgcaaacgcggctgtttttgatcgtgcgcgcgatggtttgcacggattcaaagtcgcctggagacgagactgggaagcccacttccatgacgtcaacgcccatccgctccagggccatagcaatctgcagtttctctttcacactcaggctggcttgtaacgcttgttcaccgtcgcgtaaggtcgtatcgaaaataatgacttgctggctcatggtttagatccttggtctgtgtcctggcgccttgcttacgagcataaaaaaacccgcgcattggcgcgggttttatagtcttgctggaagatgacttaacgatgaacgtcgcccaacagcctaccgcgcaaaatggatgcgtttagtagtagtaggctgagaaagcgaatgctgcgaatcattgcgtcatgctccagatgaaatcgttatgtatttagagttactggatatggggtttgatgtcaacccttgggtgaacaaaaggtctttttacccgcgagaagaattagctaattgtgctgacgatcgcgcttttttgccgatgatcctttttaggacatcagcgcatgttgagatattttcactatttgataattttgattttcgctgagagccgcaaggatagcgcgcctggccagaatcatatcttaatgaaatagctgaatttatttgtttgctgaatgtgttcatgtttgtaaaggggtattatcaatgataataaaatgtgaatgttaagggcggcttaaaccgatattgtaatagtgcttaaattatagttaaccgctgctgttattgtttatttttgatatttatgggtacacttggttttatcaagtaaacaatatggttagggggttgcgggtacgttcaactgcagaattttcgtcgccactcataaccttaatatattcctaaaattcatctttgcccttttgtaaatgtcatatgcatggtaaatgatattttcagaattaattactgcactttggcaaagggaatttagcgtgacagtggagttaaatatgttaaaagaaaatactgaatataagccggactcagaggtggaaaacgcaaaacctcagctgagaatggtcgacctgaatctgttaaccgtatttgatgcggtaatgcaggaacaaaatatcacccgtgcggcacactccctggggatgtcgcagccggcggtcagcaatgccgtatcaagactgaaggtgatgtttaatgatgagctgtttgttcgttatgggcgcggcatccagccaacggcgcgtgcttatcagctatttggttctgtacgacaggcattacaattagtgcagaacgagttgccgggctcgggcttcgagccgctcagcagcgagcgggtctttaatttatgcgtttgcagcccgctggataacgcattgacttcggttattttcaataaagttggcgagattgcgcccaacattcatttggtctttaaatcggcattgaatcaaaacacggaacatcaattacgttatcaggaaattgaattcgttattggttatgaagagtttcgtcgccctgagtttgcctgcgtgcctttatttaaagatgaaatggtgctggtggcgagccggaaacatccgcgtatttctggcccaatgatggaaaatgatatttatcaggaggagcacgcggttgtcgctctcgaccgatacgcttcatttagccagccgtggtatgacaccgcggataaacaatcgcgtattgcttatcaaggtaacgcgatggtcagcgtattaaatgtggtttcccagaccaatatggttgctatcgcaccgcgctggttagccagcgagttcgccgataagctggatttgcaaatattaccgttgccgctgaaagtgaatagccgtacctgctatctttcatggcatgaagcggcgggccgtgataaagggcatcagtggatggaagaattgctggtcaatatctgccagcgctaaacggtcgcgatacaaacgggggcttcggctcctgctttgtgtgacaaaaatcactaaacgtagaattttattctgtttgcgattatccgcccccggcgctgcccgttaaaaaatggatgatttgctgtagttggttattttccccgagcattgactatcatattttcttatctccgaagtttttcaccgtgttttagctgcgaacctttcttttatccttttaatgcctcttaggtgccgacggtcgccaattgcctgcccgttagcgagcagttatggtaacggcatgcagtctattcacctcaggacgaagcttttgcgcttcgtcctgtgcgagcgcgcggaaatcggattccgctgtcgttaaaaactataagccgggaggcaaaccatggagatgttgtcaggagccgaaatggtcgtccagtcgctggtcgatcagggcgtcaagcaggtgttcggttatcccgggggcgcggtcctcgatatctatgatgcgttacatacccttggcggaatcgatcacgtactggtccgccatgagcaagctgccgtgcatatggcggatggccttgcgcgcgcaacgggcgaggtcggggtagtcctggtgacctcgggtccgggggcgactaacgcgattaccggcattgcgacggcttatatggattccattccgctggtgattctttccggccaggtcgcgacgtccttaattggctacgatgctttccaggagtgcgacatggtggggatctcccgaccggtggtaaaacacagctttctggttaagcaaaccgaagatattcccggcgtgctgaaaaaagcgttctggctggcggccagcgggcgtcccggcccggtcgtcgtggatctaccgaaagatattctcaatccggcgaaaaaactgccgtacgcctggccagatacggtcagcatgcgctcttataatccgacgacgtcgggtcataaagggcagattaaacgtgcgctgcagacgctggtggcggccaaaaaaccggtggtttatgtcggtggcggggcgattaatgcgcaatgtgaaccgcagctgttcgcgctggttgagaaactgaagctgccggtggcgtcttcgctgatggggctgggcgccttccctgcttcacaccagcaggcgttagggatgctgggcatgcatgggacctatgaagccaatatgaccatgcaccattccgacgtgattttcgccgttggcgtgcgcttcgacgatcgtacaacgaataatctggccaggtactgtccgaacgcgacggtgctgcatattgatatcgatcccacttcgatctccaagaccgttcctgccgacgtgcctatcgttggcgacgcccgcctggtgctggaacagatgctggaactgctcgaacatgaagagacgcagcagccgctggatgaaatccgcgactggtggcagcagattgagcagtggcgcgcgcgtcattgcctgcagtacgacacgcaaagcggcaagattaaaccgcaggcggtaattgagaccatctggcggctgacgcacggcgatgcgtacgtgacgtccgatgtgggtcagcatcagatgttcgcggcgctttattatcctttcgacaaaccgcggcgctggatcaactcaggtggtctgggaacgatgggatttggccttcccgccgcgctgggcgtgaagatggcgctgccggaagaaacggtgatttgcgtgaccggcgatggcagcatccagatgaatattcaggagctctccaccgcgctgcagtacgagctgccggtgctggtgctgaacctcaataaccgctacctcgggatggtgaagcagtggcaggatatgctttactctggccgtcattcacaatcctatatggagtcattgcctgattttgctcgcgtcgcggaagcctacggccacgtggggattcgtatcagcgacccgcaggagctggaagcgaagctcgctgaggcgctggagcaggtgcgtaataatcgactggttttcgttgatgtaacggttgacggcagtgagcatgtataccccatgcagattcgcggcggcggtatggacgagatgtggctgagcaaaacggagaggacctgattatgcgccggatattatcagtattactggagaacgaatcgggcgcgctatcccgcgtgatcggcctcttttcacagcgcggttataatattgaaagcctgacggtagcgccgacggacgatccgacgttatccagaatgacgattcaaaccgttggcgatgagaaagcgattgagcagatagaaaagcagctgcacaagctggtcgacgtgctgcgcgttaacgagcttggacaaggcgcgcacgttgagcgtgaaattatgctggtaaaggtccaggccagcggctatggacgcgatgaggtcaagcgcaatacggaaatcttccgtgggcaaattatcgacgtcacgccgtctatctataccgttcagctggcgggaaccagcgataagctggatgcgtttttggcttcgctgcgcgacgtggcgcgaattgttgaagtcgcccgctcgggcgtagtcggattgtcgcgcggcgacaaaatcatgcgctgagccgctgaaaccgacgtaaaaatagcccgacacagcctgtcgggctatttttttgcgaaatcggtgggaactgtggactaaagcggttgctgcgcttacttttctgcgcttagatgttataaaaacgaatccatacctgaagaatggttatgttctgtacttattacccaaggggcaattgtgaaactggatgaaatcgcccggctggccggtgtctcgcgaacgaccgctagctatgtgattaatgggaaagcgaagcagtatcgcgttagcgataaaactgttgaaaaggtgatggcggtggttcgtgagcacaactatcatccgaatgcggttgctgcaggcttgcgtgcaggacgtacgcggtccattggtctggttatcccggacctggaaaacaccagctatacgcgcatcgctaattacctggagcgtcaggcgcgccagcgcggctatcagctattgatcgcctgctccgaggatcagccggataacgaaatgcgctgcattgagcatctgctgcagcgtcaggtcgacgcgataatcgtttccacctcattaccgcctgaacatccgttctatcagcgctgggctaacgatccgttcccgattgtcgcgcttgaccgcgcgctcgatcgagagcacttcaccagcgtggtgggtgccgatcaggacgatgctgaaatgctcggggcggaattgcgtaagtttccggctgaaacggtgctgtaccttggcgcgctgccggagctttcggtgagcttcctgcgcgagcagggattccgtacggcatggaaggacgatccgcgagaggtgcatttcctctatgcaaacagctacgagcgcgaagccgcggcgcagctctttgaaaagtggctggaaacgcatccaatgcctcaggcgctgtttacgacttcgtttccgctgctgcagggcgtgatggacgtcacgctgcgccgggaagggaagctgccttccgagctggctattgccacttttggcgataatgagctgctggatttcctccagtgtcccgttttagccgtggcccagcgccaccgcgacgtggcggagcgcgtgctggagatcgtgctcgccagccttgatgaaccgcgtaagccgaaacctgggttaagccgtatccggcgcaatctttatcgtcgcggcagcctgaatcgacgctaagcgcgtgaccaggattattcgtagagtattcgccagacggagacgcgtctggcgataatccgctgagatgacgtaaaaattgcagggttaaggatctttcagacaaatccttaatcttcctgacatctcttttaattctattcttcgcgccatttatttcgcggtttaattagcccataaaaggattagcatatttatttgtattattttgttacattcagcgggtgagttgctgaattaacactcatttcctcgctattatggtagcgataagcgctgtaccccgcagtaagagtgcctctcctgtgaaaactggtgctgttaacggtcatcagaatggcctaaaatgccgctcgcgtcgcaaactgacactttatattttcccttcgaagatattttgctgctttaactgttacaagtttgttggttgttttcttaccgatattcataacgttaatttgcctcgtttgttggttgatttttcctcagggcgaatatcggctgtaaataatgggtttttgagctctgttggcatccgtgctggcttgacaagcttttcctccgctccgtaaactccttcttgtgggaatttgtggggtaaagtggcgaaaaggggtgaggctggcatgttccgtggggcaacgttagtcaatctcgacagcaaaggccgtctggccgtaccgacgcgctaccgcgacgggctgatcgagaacgcttccggtcaattggtgtgcaccattgacatccatcacccgtgcctgctgctttaccctttgcctgaatgggaaatcatcgagcaaaaattatcgcgtttatcgagcatgaaccccaccgagcggcgcgtacagcgtttgcttctgggacatgccagcgaatgtcagatggatagcgccgggaggctattaatcgccccggtgctgcggcaacacgccgggctgacaaaagaagtgatgctggtcgggcagttcaataagtttgagctgtgggacgaaacgacctggtatcaacgggtcaaggaagatatcgacgctgagcagtccgcttccggggaactgtcggagcgcctgcaggatttgtctttgtaaaatgatggaaaattataaacacactacggtacttctggatgaagccgttaacggcctgaatattcgtcctgacggtatctacattgatggtacctttggccgcggcggtcactcgcgcctgattctctcccagctgggagcggagggacgcctgctggcgatcgatcgcgacccgcaggctatcgccgtcgcgaaaactatcgatgatccccgcttttccatcgttcatggtcctttttctcagctggccgactatgttggcgagcgcaatctaaccggcaagatcgacggtattctgctcgatcttggcgtctcctcgccgcagctggatgacgctgaacgtggcttctcatttatgcgcgatggtccgctggatatgcgcatggatccgacgcgcggccagtcagccgctgaatggctacaaaccgccgacgaagccgatatcgcctgggtcatcaaaaccttcggcgaagagcgctttggtaaacgcattgcccgcgccatcgtcgaacgcaaccgcgtggaaccgatgacgcgtaccaaagagctggcggaggtcgttgcggcggcgacgccggtgaaagataaattcaaacatcccgcgacccgtaccttccaggcggtgcgcatttgggtgaacagtgaactggaggagatagagcaggcgctaaaaagctcgctcagcgtgctggccccgggcgggcggctctcaatcatcagtttccactcgctggaagaccgtattgtgaagcgctttatgcgcgagcaaagccgcggtccgcaggttccggcagggttaccgatgaccgaagagcagcttaaaaaactgggcggccgtgagctaagagcattaggcaagttgatgccgggcgaaaaagaggtagctgaaaatcctcgtgcccgtagttcagttctgcgtattgcagagaggacgaacgcatgatcggcagagtgacagaagccctaagcaaggtgaaagggtcgataggaagcaacgagcgccatgctttgcctggcgtgatcggagacgacctcctgcggtttgggaagctgccactctgcctgttcatttgcatcattattacggcgattacggtggtgacaacggcgcaccatactcgcctcttaaccgcgcagcgcgaacagctggtgctggaacgcgacgcgctggatattgaatggcgcaacctgatcctcgaagaaaatgctctcggcgatcacagtcgggttgagcggatcgcgaccgagaagctgcagatgcagcacgtcgatccatcacaagaaaatatcgttgtacagaaataaggattattgcgacgcatgaaagcagcgccgaaaacgccaaaagcaaaacgtcaggaagaacaggccaactttatcagttggcgttttgcgttgctgtgcggctgtattctgctggcgctgggcttcctgctgggccgcgtggcctggctacaggtgattagcccggacatgctggtacgccagggcgatatgcgttctctgcgcgtgcaggaagtctctaccgcgcgcggaatgataaccgatcgttccggccgcccgctggcggtgagcgtgccggtaaaagctatctgggctgacccgaaagagctgcatgaagccgggggcgtgaccctggacaaccgctggaaggcgctggccgatgcgctgaatatgccgctggatcagctggcatcgcgcatcaataccaatccacggatgcgttttatctatctggcgcgtcaggtgaaccctgatatggccgactacatccgtaaattgaagctgccggggattcatctgcgggaagagtcccgccgctactatccgtctggcgaagtaaccgctcacctcattggcttcactaacgtcgatagccaagggattgagggcgtagagaagagctttgataagtggcttaccggccagcccggcgagcgtatcgtgcgtaaagaccgctatggtcgggtaatcgaagatatttcgtccaccgatagccaggccgcgcataacctggcgctgagcattgacgaacgcctgcaggcgctggtgtatcgcgagctgaataatgcggtggcgttcaacaaagcggagtcaggtaccgcggttctggtcgacgttaacaccggcgaagtgctggcgatggccaacagcccgtcgtacaacccgaataatttcgcgggcacctccaaagatacgatgcgtaaccgcgccattaccgacgtgtttgagccaggttcaacggtgaagccgatggtggtgatgaccgcgcttcagcgcggcattgttaacgaaaataccgtactgaacaccattccctatcgaattaacggccacgaaatcaaagacgtggcgcgctacagcgaattgaccctgaccggggtactacagaagtcgagtaacgtcggtgtttctaagctggcgttagcgatgccgtcctcagcgttagtagatacttactcacgttttggactcggaaaagcgaccaatttggggttggtcggagaacgcagtggcttataccctcaaaaacaacggtggtctgacatagagagggccaccttttctttcggctatgggctaatggtaaccccgttacagttagcgcgagtctacgcaacgatcggcagctacggcatctatcgcccgctgtcgattaccaaagttgatccaccggttccgggcgagcgcgtcttcccggaatcactcgttcgtaccgttgttcatatgatggaaagcgtggcgctgcccggcggcggcggcgtgaaggcggcgatcaaaggctatcgcatcgccattaaaaccggtacggcgaaaaaagtagggcccgacggccgctacatcaacaaatacattgcttacaccgcaggcgttgcgcccgccagccatccgcgctttgcgctggtggtggtgatcaacgatccgcaggcgggtaaatactacggcggcgccgtttccgcgccggtcttcggtgccatcatgggcggcgtactgcgcaccatgaacattgaaccggatgcgctggcaacggctgaaaaaagtgaattagtgattaatcaaggcgagggaacaggtggcagatcgtaatttgcgcgaccttctcgctccgtgggtgccaaatgcgccggagcgaattctgcgagaaatgacgctggacagccgggtggctgcttctggcgatctttttatcgcggttttaggtcatcaggcggacgggcgtcgttatatcccgcaggcgatagcgcaaggtgttgctgccattattgctgaggccaaagatgaggcccatgacggcgaaatccgtgaaatgcacggtgtgccggttatctatctgagccaactcaacgagcgcttatccgcgctggccgggcgtttttaccatcagccttcggaacaactgcgcctggtgggcgtcaccgggactaacggcaagaccaccacgacacagctgctggcgcagtgggcgcagcggctgggggaaaccagcgcggtaatgggaaccgtaggcaatggcctgctggagaaagttatcccaacggaaaacaccaccggttcggccgttgatgttcaacacgtactctctggcctggcagggcagggggcgacgttcgccgcgatggaagtctcttcccacgggctggtgcagcatcgcgtagccgcgctgcagtttgccgcctcggtcttcaccaacctgagccgcgatcacctcgattaccacggtgatatggagcattacgaagcggcgaaatggctgctctactcaacccaccattgcgggcaggcgattgttaatgcggacgatgaagtcggtcgccgctggctggcgaagctgccggatgcggtcgccgtatcgatggaagatcacattaacccgaactgccggggccgctggctcaaagcgaccgccgtgagctatcacgatagcggcgccaccattcagtttgcctccagctgggggaacggcgagatcgaaagccgcctgatgggcgcctttaacgtcagcaatctgctgctggccttagccaccctgctggcgctgggctatccgcttgccgaactgctgaaaaccgccgcgcgcctgcagccggtatgcgggcgtatggaagtgttcgccgcgccgggtaaaccgaccgtggtcgttgattacgcccacacgcctgatgcgctggaaaaagcgctgcaggcggcgcgtctgcactgtcgcggtaaactgtggtgcgtatttggctgcggcggggatcgcgacaaaggcaagcgtccgctgatgggcgctatcgccgaagagtttgccgatatcgtggttgtcaccgacgacaacccgcgcaccgaagagccgcgggcgattatcaatgacattctggccggcatgctggacgcgggccatgccagggcggtggaaggtcgtgcggaagcggtcactaatgcggtgatgcaggcgaaagaaaacgacgtcgttctggtggcgggcaaaggccacgaggactatcaaatcgtcggcaatcgccgactcgattactctgaccgcgtcaccgtggcgcgtctgctgggggcggtagcatgattcgcttgactctcagccagctcgccggcatcacgcatggcgagctgcacggccgcgatgtggcgattgatgacgtcacctccgatacccgtaaaatcacggcgggctgcctgttcgtggcgctaaaaggcgagcgctttgatgcgcatgactttgccaaacaggcgaaagctgccggcgcgggcgcactgttggtcagccgtcagctggcctgcgatctaccgcaggtggtggtgaaggatacgcgtctggcgtttggcgaactggccgcgtgggtgcgtcagcaggtgccggcgcgcgtggtcgcgctgaccggatcttccggaaaaacctcggttaaagagatgaccgcggcgattctgagccagtgcggcaatacgctgtataccgcaggtaacctgaacaacgatatcggcgtgccgatgacgctgctgcgtctcaccaaagaacatgactacgcggtcatcgagttaggcgctaatcaccagggggaaattgcctggaccgttagcctgacccgtcccgaagccgcgttagtgaataacctggccgccgcgcacctggaaggctttggctctctggaaggcgtggcgaaagccaagggcgaaatctacaccggtctgccgctcaacggcatcgcgattatgaacgccgacaataatgactggctgaactggcaaagcgtgattggcgagcgtaaaacctggcgtttttcgccgaacgccgcccacagcgatttcacggcaaccaacgttcatgtgacgtcgcacgggactgaatttactctgcagaccccaacgggcagcgttgatgtactgctaccgctgccggggcgccataacatcgccaacgcgctggctgccgcggcgctgtcaatggcggtgggggcgacgcatgaggcgatcaaagcgggtctgaaagatctgaaagcggtaccggggcggttattcccgattcagctgaccgacagccagctgctgctggatgattcctataacgccaacgtcggctcgctgaccgctgcggtacaggtgctgtctgagatgccggggtaccgggtactggtcgttggcgatatggccgaactcggcgcggaaagccaggcgtgccatcgtcaggtgggcgaagcggcaaaagcggccgggctcgatcgcgtactgagcgtcggtacgttgagcgcagagatcagcggcgccagcggcgttggcgaacattttagcgagaaggccgcgctggtgacccgcctgcgcgagctcaccgcagaacataaaattatgaccattttagtgaagggttcacgtagtgccgccatggaagtggtagtacgcgcattacaggagaacggaacatgttagtatggctggccgaacatttggtcaaatattattcaggctttaacgtcttttcctacctgacgtttcgcgccattgtcagcctgctgaccgcgctgttcatctctctgtggatgggcccgcgcatgatcgcccgtctgcaaaaactctcctttggccaggttgtacgtaacgatggcccggaatctcactttagtaagcgcggtacgccgaccatgggcgggatcatgatcctgaccgccattgttgtctccgttctgctgtgggcctatccatctaacccctacgtctggtgcgtgctgacggtactggtgggctacggcatcatcggcttcgttgatgactaccgtaaggtggttcgcaaagataccaagggcctgattgcccgctggaaatacttctggatgtcggtgattgcgctgggcgtcgcctttgcgctgtatatggcgggtaaagatacgccggcgactcagctggtggtgccgttctttaaagacgtgatgccgcagctgggcctgttctacgtcctgctggcctattttgttatcgtcgggaccggtaatgcggtcaacctgaccgacggccttgatgggctggcgattatgccaaccgtattcgttgccgccggcttcgcgctggttgcctgggcgaccgggaacatgaatttcgccaactacctgcatatcccttatttgcgtcacgccggtgaactggtgatcgtctgtacggcgattgtcggcgcgggcctgggcttcctgtggtttaacacctatccggcacaggtctttatgggcgatgtgggttcgctggcactcggcggcgcgctggggattatcgccgtgctgctgcgccaggaattcctgctggtgattatgggcggcgtatttgtggtggaaacgctctcggtgattctgcaggtcggctccttcaagctgcgcggtcagcgcatcttccgcatggcgccgattcaccatcactatgaactgaaaggctggccggaaccgcgcgttatcgtgcgtttctggattatttcgctgatgctggtgctgattggcctggcgacgctgaaggtacgttaatcatggcagattatcagggtaaaaaagtcgtcattattgggctgggtatgaccggcctgtcatgcgtggactttttcatggctcgcggcgtgacgccgcgggtgatggatacccgcgttgcgccggcggggctggacaagctgccggaagccgttgagcgctatgtcggcggtctgaacgaagactggctgttgacggcggacctgattgtcgccagccctggcatcgcgctggcgcatccttccctgagcgccgcggcggatgcgggggtagaaatagtcggcgatattgaactgttctgccgcgaggcgcaggcgccgattattgcgatcaccggttccaacggtaaaagcaccgtgacttcccttgtgggagaaatggcgaaagcggcggggttgaacgttggcgtcgggggcaatattggcctgccggcgctgatgctgctggatcctgagcgcgaactctatgtcctggagctttccagcttccagctggaaaccacctccagcctgcgggcggccgcggcgacgatccttaacgtcaccgaagatcatatggaccgctatccgctggggcttcagcagtaccgcgccgccaaactgcgcgtttatgagaacgcccgggcctgtatcgttaatgccgacgatgcgttaaccatgccggtacgcggcgctgacgatcgctgcatcagcttcggcgttgacgttggtgactatcacctgaaccgccagcagggagaaacctggctgcgcgtcaaaggcgagaaagtgctcaacgtcaaagagatgaagattagcggccagcataactacagtaacgcgcttgcggccctggctctggcggacgcggcgggtctgccgcgcgccagtagcctgaaagcgctgaccacattcaccgggctggcgcatcgtttccaactggtgctggagcacaacggcgtgcgctggatcaacgattctaaagccaccaacgtcggcagtactgaagcggcgctcaatgggctgcatcttgatggaacgctctatctgctgctgggcggcgatgggaaatccgctgatttcacgccgttaagccgttacctgaccggcgacaacgttcgcctgtactgcttcggccgcgacggcgcgcagctggcggcccttcgcccggacgtcgccgtgcaaacggaaaccatggagcaggcgatgcgccagattgcgccgcaggttgtcgcgggtgatatggtgctgctgtctcccgcgtgcgccagcctcgatcagtttaaaaactttgaacaacgcggcgacatctttgctcgcctggcgaaggagttaggttgatgcgtttatcactcccgcgcctgaaaatgccacggctgagactgccgcgtctgccgggaatgtttattttcgcatggctgttcgccgcgctgaaaggctgggtgatgggctcgcggcaaaaagataccgatagcctggtgatgtatgaccggatgctgctgtggctgacctttggcctggccgcaatcggcttcattatggtgacctcggcgtcgatgccggtaggccagcgtctggcgaacgatccgtttctgtttgccaagcgcgatggcttatacattctgctggcgctagggctggcgatggtgacgctgcgcctgccgatggagttctggcagcgccatagtaccgcgatgctgatcgcctctatcgtcatgctgctgattgttctggtggtcggtagctcagttaacggggcgtcgcgctggattgcgctggggccgctgcgtatccagcctgcggagtttaccaagctgtcgctgttttgctacatcgccaactacctcgtgcgtaaaggcgacgaagtgcgtaacaacctgcgcggcttcttaaagccgatgggcgtgattttcgtactggcgattttactgctggcgcagcctgacctcggtaccgtcgtcgtgctgtttgtgaccaccctggccatgctgttcctggcgggagccaagctgtggcagtttatcgccattatcgggatggggctttcggcggtcgtactgctgattctggctgaaccgtaccgtatccgccgcgtgacctctttctggaacccgtgggaagatccgttcggcagcggctaccagctaacccagtcgctgatggcctttggtcgcggcgaaatgtgggggcagggcctgggcaattcggtccagaagctggagtatttgcccgaggcgcacaccgatttcatcttcgccattatcggtgaagagctcggttatatcggtgtggtactcgcacttttaatggtattcttcgtcgcttttcgcgccatgtccattggccgcaaagcgctggagattgaccaccgtttctccggatttctggcctgcgccattgggatctggtttagctttcaggcgctggttaacgtcggcgcggcggcggggatgctgccaaccaaaggcctgacgctgccgctgatcagttacggcggttcgagcctgctgattatgtcgacggcgatcatgttgctgttacgaattgattatgaaacgcgtctggaaaaagcccaggcgtttacacggggtgttcgatgagcggtcaggaaaagcgcttaatggtgatggcaggcggtaccggcggacacgtgttcccgggactggcggttgcgcaccatttaatggaccagggctggcaggtccgctggctgggtaccgcggatcgtatggaagcggatttagtgccgaagcacggcattgaaattgatttcattcagatatccggcctgcgcggcaagggcctgaaggcgcagatgctggcgccggtgcgtattttcaacgcctggcgtcaggcgcgagcgattatgcagcgttttcagccggacgtggtgctgggcatgggcggctatgtttccggacccggcggtctggcggcatggtcgctggggatcccggttgtcctgcatgaacagaacgggattgccggcctgacgaataaatggctggcgaaaattgccaaaaaggtcatgcaggcatttcccggcgctttcccgcatgccgacgttgttggcaacccggttcgtaccgatgtgctggcgctgccgctgccggaacagcggttagtcgggcgtcaggggccgattcgcgtattggtcgtcggcggctcgcagggcgcgcgcgtgctcaatcagacgatgccgcaggtggcggcgaagctgggttctgctgtcaccatctggcaccagagcggtaaagggggccaggagagcgtacagcaggcctattccgacgccggccagccgcagcacaaagtcaccgaatttattgacgacatggcggcggcttatgcctgggccgatgttgtcgtatgtcgttccggggcactgacggtgagcgaaattgccgccgcgggtttaccggcgctgtttgtgccttttcagcacaaagatcgtcagcagtactggaatgcgctgccgttagagaaggcaggggcagcgaagatccttgagcagccgcagtttaccgtggaggccgtcacgcaaaccctggcgggttgggatcgcgagacgctgctggatatggcggagcgagcgcgcagagcctcgattccggacgcgaccgaacgggtagcagaagaagtgagcgccgcagcactggcgcgttaatcgcggtgatgatcaccgtccgaataaagaagttgatggcgtaaagaatgaatacacaagatctggcaaaactgcgttctatcgtgcccgagatgcgtcgcgtccggcacattcactttgttggcattggcggtgccggcatgggcggtattgccgaagttctggccaacgaaggttatcagattagcggctccgacctggcgccgaatccggtgacccagcagttgactcagcttggcgccacgatttatttcaaccatcgccctgaaaacgtgcgcgatgcgagcgttgtcgtggtttccagcgcgatttctgcggataacccggaaatcgtcgccgcccacgaagcgcgtattccggttattcgccgcgccgagatgctggcggagctgatgcgttttcgccacggcattgccattgccggcacgcacggaaagaccacaaccacggcgatggtctcgagcatttacgctgaagccgggctggatcctaccttcgtgaacggtggtctggtcaaagccgctggcgtgcacgcgcgccttggccatagtcgttacctgattgccgaagcggacgaaagcgacgcctcgttcctgcatttacagccgatggtcgctatcgtgaccaatatcgaagccgatcatatggatacctaccacggcgacttcgaaaacctgaagcagacttttattaacttcctgcacaatctgccgttctacggacgcgcggtgatgtgcgtggacgatccggtgattcgtgaactgctgccgcgcgttggccgccagctcaccacctacggatttagcgatgatgccgacgttcgcgtggaagagtatcgtcaggttggcgctcagggccatttccgtctggttcgccaggataaagaggtcattcaggtgacgctgaacgcaccgggtcgccacaacgcgctgaacgcggcggcggcggtggccgttgccacggaagagggcattgatgatgacgctattttgcgcgcgctggaaagcttccagggcaccggccgtcgctttgatttccttggcgaataccccttagctgaagttaacggtaaagagggtaccgcgatgctgatcgatgattatggtcatcatcctacagaagtggatgccaccatcaaagcggcgcgggcgggctggccggataaaaacctggtgatgctgtttcagccgcaccgttttacccgtacgcgcgatctgtacgatgatttcgccaacgtgctgacccaggttgacgcgctgctgatgctggacgtttattccgcgggcgaagccgctattcctggcgccgacagccgctcgctgtgccgtacgattcgcggccgcggtaaagtcgacccgattctggtttccgacccggcgcaggcggcagagatgctggcttcagtattgaccggcaacgatctggtgctggttcagggggcgggaaacattggtaaaatcgcccgtcacctggcggaaatcaaattgcagccgcaaaaatcgcaggaggagcgccatggctgataaaatcgcggtcctctttggcggaacctccgctgaacgtgaagtctctctcaattcaggttcggcggtgctcgccggcctgcgcgaagccggggtcgatgcgcacccggtcgacccgcgcgacgtggatattacccaattgaaaaatatgggttttcagaaagcgtttattgccttgcacggtcgcggcggtgaagatggtacgttgcagggtctgctggagctgattcaactcccctataccggcagcggcgtgatggcttccgctatctcaatggataagctgcgcagcaaactgctgtggcagggcgccgggctgccggttgcgccgtgggttgcgctgacgcgtaaacagttcaccgcggggctttccgctgaggtagaacagcagatttccgccctcggactgccgttgattgttaaacccagtcgcgaaggctccagcgtcggtatgtccaaagtcagcgaaagttgtgcattacaaaatgcattggcgctggcttttcagcatgatgacgaagttctgattgaaaaatggctcagtgggccggaatttaccgtcgctatcgtcggagaagaaattttaccgtcaatacgtatccaggcggctggaaccttctatgattatgaagcaaagtatctctctgatgaaacgcaatatttctgccctggcctggaagattccgcgcgcgaggcagaaatgcaggctctggtgcaaaaagcctgggatagtcttggctgttacggctgggggcgaattgatgtgatgctggacagcgatggccagttttatctgctggaagcaaacacctctcctggcatgaccagccatagtctggtgcccatggcggcgcgtcaggcagggatgagcttctcgcagcttgttgtacgaattctggacctggcggggtgatatgtcgcaggctgcgctgaatacgcggaaccacgaagaggaagacgaaacctcttcgcgtcgaagtaatggctctcgtctggcgggtatcttcttcctgctggcggtgctctgtaccgtgctggtcagcggatggatggttctgggctggatggaagatgcacagcggttaccgctgtcaaagatggtggtcaccggtgagcgtcactacacgcgcaacgatgatatccgtcaggcgattctggcattggggtcgccgggcacctttatgacgcaggacgtcaacattattcaaagccagattgaacgtctgccgtggattaagcaggcgagcgtcagaaagcagtggccggacgaattgaagattcatctggttgaatatgtgccgatagcgcgctggaatgatcagcatatggtagacgtggacggaaattctttcagcgtgccgtcagatcgcaccagtaaacagaatttaccgatgttgtacggcccggaaggcagtgagaacgaagtccttcagggataccgcgacatggggcaggtgctggcgaaggataaattcacgttgaaagtagcggcaatgaccgcgcgtcgctcctggcagttgacgcttaataacgacattaagctcaaccttggtcggggtgacaccatgaaacggcttcagcgctttatggaactctacccggttcttcagcagcaggcgcagaccgacggcaaacggataagctacgttgatttgcgttatgactcgggagcggcagtcggttgggtaccggctcctgtagaggaaactcaacaacaacagaatcaggcacaggcagaacaacaatgatcaaggcgacggacagaaaactggtagttggactggagattggcaccgctaaggttgccgctttagtaggggaagttctgcccgacggtatgattaatatcattggcgtgggcagttgcccatcgcgtggtatggataaaggcggagtgaacgacctggaatccgtggtgaaatgcgtgcagcgcgccattgaccaggccgaactgatggcggattgccagatctcgtcagtctatctggcgctttcaggcaaacatatcagctgtcaaaatgaaatcggtatggtgccgatttctgaagaagaagtgacgcaggacgacgtagagaacgtggtacataccgcgaaatcggttcgcgtgcgcgacgagcatcgcgttctgcacgttatcccgcaggagtacgccatcgactaccaggaggggattaaaaaccccgtaggactgtctggcgtacgcatgcaggcgaaagtgcatttgattacctgccataacgatatggcaaaaaatattgtcaaagcggtggagcgttgcggtctgaaagtcgaccagcttattttcgccggtttagccgccagctattccgtattaacggaagacgaacgtgaactgggtgtctgcgtggtggatatcggcggtggtacaatggatattgcggtctataccggcggcgcgctgcgtcataccaaagtgatcccgtacgcgggcaacgtggtgaccagcgatattgcctacgctttcggtacgccgccgagcgacgcagaagccattaaagtgcgtcacggctgtgcgctgggttccatcgttggtaaagacgagaacgtggaagtccccagcgtaggcgggcgtccgcctcgtagtctgcagcgtcagacgctggccgaggtgattgagccacgttataccgaattgctcaacctggtgaatgaagagatcctgcagctgcaggaacagctccgtcaacaaggtgtgaagcaccacctggcggctggcattgtattaaccggcggtgcggcgcaaattgaaggacttgccgcctgcgcgcagcgcgtattccatacgcaggtgagaattggcgcgccgctgaatattaccggattaacggattatgcccaggagccgtattactcgacggcggttgggctgctgcactacgggaaggaatctcatctcagtggtgaagcagaggtggaaaaacgcgtaacggtcgggtcgtggatcaaacgactcaacagttggttgcgaaaagagttttaattttttaagagaacgcagaaaattagcgttctcaggcgacaggcacaacggagagagaaattatgtttgaacctatggaactgaccaacgacgcggtgattaaagtcatcggcgtcggcggcggcggcggtaacgccgttgagcacatggtgcgcgagcgcattgagggtgttgaatttttcgcggtgaacaccgacgcgcaggctctgcgcaaaacggctgttggccagactatccagatcggtagcggtattaccaaaggtctgggcgcaggcgcaaacccggaagtcggccgtaacgcggcggatgaagaccgtgaagcgctgcgtgccgcccttgacggcgccgatatggtgtttatcgcagccggcatgggcggcggtaccggaaccggtgctgcgccagtggtggctgaagttgcaaaagatttaggtatcctgaccgttgccgtggtgactaagccgttcaattttgaaggcaagaagcgcatggcgttcgctgagcagggcatcaccgagctgtccaagcatgtggattcgctgatcaccatcccgaacgacaagctgctgaaggttctcggccgcggcatttctctgctcgacgctttcggtgcggccaacgacgtgctgaaaggcgcggtgcagggtatcgctgagctgatcacccgcccaggcctgatgaacgtcgactttgcggacgtgcgtaccgtgatgtctgaaatgggctacgccatgatgggctccggcgtggcgagcggtgaagaccgtgcggaagaagcggctgaaatggcgatctcttctccgctgctggaagatatcgatctgtccggcgcgcgtggcgttctggtcaacatcactgcgggcttcgacctgcgtctggatgagttcgagaccgtaggtaacactatccgcgcatttgcttcggataacgccaccgtggttatcggtacctctctggacccggatatgaacgacgagctgcgcgtaaccgtcgttgctaccggtatcggtatggacaaacgtccggaaatcaccctggtcaccaacaaacaggtgcagcagccggtgatggatcgttaccagcagcacggtatgtctccactgacgcaagagcagaaaccggccgcaaaagtggtcaacgacaatacgccgcaggccgcgaaagagccagattatctggatattccagccttcctgcgtaagcaagccgattaagaattggctggaagttgggcatctgcgctctttgtgctaaactggcctgccgaatgtatagtacacttcggttggataggtaacttggcgagattatacgatgatcaaacaaaggactcttaaacgtatcgttcaggcgactggcgtcggtttgcataccggcaagaaagtcaccctgacgttacgccctgcgccggcaaataccggggtcatctatcgtcgcaccgacttgaatccaccggttgattttccggctgatgccaaatctgtgcgtgataccatgctctgtacttgcctggtcaatgagcatgacgtgcggatatcgacggttgagcacctcaatgccgcgctggctggcttgggtatcgacaacattattattgaagtcgatgcgccggaagtcccaattatggacggtagtgcggctccgttcgtttatctgttgctggatgccggcatcgatgaactgaactgcgctaagaaatttgtgcgtatcaaagagacagttcgcgttgaagatggcgataaatgggccgaattcaaaccgtataatggtttttcactggacttcaccattgattttaaccatccggcgattgactccagcagccagcgctatgcaatgaacttctcggctgatgcgtttatgcgccagattagccgcgcgcgtaccttcggttttatgcgtgatatcgaatatctgcagtcccgcggcctgtgcctgggcggcagcttcgattgtgccatcgttgttgacgattatcgcgtactgaacgaagacggtttgcgctttgaagatgagtttgtccgtcacaaaatgctggatgccattggcgacctctttatgtgtggtcacaacattatcggcgcatttacggcgtacaaatccggtcacgcgttgaataacaaactgctgcaggctgttctggcaaaacaggaagcctgggagtatgtgaccttcgaggacgacgcagaaatgccgctggcgttccgcgccccgacgctggttctggcataagtcagacccggcagtaaattcgactggtaacctggtactctctccggccagggagccagtcgttttcttttttatattcccgctgcgtcctgctttgatttttaactgcattttttgcgcgttcgttccttttttaaacgtttttcccccgcctgagacctcattcctgctgccgtgacggcgtattaatgttagtatttggacgcaaaatatttcttagggttgctaccaacaaaaggtaacgtaagtgagtggattgctgacgcgctggcgacagtttggcagacggtatttctggccgcatctcctgttggggatggtcgcggctagcctcggcctgcctgcgcttagcaatggtcatgagcatgaggccgcgtcgcccgctaaaacgacgtccagcaaccataatcctgctaaagttaatttttctcagctagcgctgctggaatcttccagtcgtcggcccaatttcacggttgattactggcatcagcacgccattcgtacggtcattcgccacctctcttttgcgatggccccgcaggcgctgccggtagcggaagagtcttcaccgcttcaggcgcagcatctggcccttctcgacacgcttagcgcgctgttgacgcaggagagtaaacctccggccattgttcatctggcggcatataacccctctatttcccactgcgcgtttcgcgtctgtacctggattagccaggtggccggcatacgcgcagggcctcaacgtctcagctaaaccaaaaacggaccattctatttttttgtgactccgcaccgcggggcgtttgagattttattatgctaatcaaattattaactaaagtattcggtagccgtaacgaccgtacgctgcgtcgtatgcgcaaggccgtcaacgtgatcaacgccatggaaccgtccatggaaaaactgtccgacgacgaactgaaagggaaaaccgctgagttccgcgctcgcctggaaaaaggcgaagccctggagagcctgatcccggaagcctttgccgtcgtgcgtgaagccagtaaacgcgtcttcggcatgcgtcactttgacgttcagctgctgggcggcatggttctcaacgaccgctgtattgcagaaatgcgtaccggtgaaggtaaaacgctgaccgcaactctgcctgcctatctgaatgcgctgaccggtaaaggcgttcacgtggtgaccgtcaacgactatctggcgcagcgtgatgccgagaacaaccgcccgctgtttgaattcctggggatgaccgttggcattaatatgtccggcctgcctgcgcctgccaagcgtgaagcctacgcagccgatattacttacggtaccaacaacgaatacggctttgactatctgcgcgacaatatggccttcagtcctgaagagcgcgtccagcgcaaactgcactatgcgctggtggatgaagtcgactccattctgatcgatgaagcgcgtaccccgcttattatttccggcccggctgaagacagctcggaaatgtacaagaaggtgaacaagatcattccgcacctggtgcgtcaggataaagaagactccgaaacctttaccggcgaagggcacttctccgtcgatgagaaagcgcgtcaggtaaacctgaccgaacgcggcctggtgctgattgaagagctgctggtgaatgaaggtattatggaagaaggcgagtcgctgtactcaccgaccaatatcatgctgatgcaccacgtgaccgccgcgctgcgcgcgcatgtgctgttcacccgcgatgttgattacatcgtgaaagatggcgaagtgatcatcgtcgacgaacacaccggccgtacgatgcaggggcgccgctggtccgatggcctgcaccaggccgttgaagcgaaagaaggcgttgatattcagaacgagaaccagacgctggcttcaattaccttccagaactatttccgcctgtacgagaagctggcagggatgaccggtaccgccgataccgaagcgtttgaatttagctcaatctataagctggataccgttgtggttccgaccaaccgtccgatgattcgtaaagacatggcggacctggtctatatgaccgaagcggaaaaaattcaggccattatcgaagatattaagcagcgtaccgccgcgggtcagccggtgctggtgggtaccatttctatcgaaaaatcagaagtggtctctaatgaattaacgaaggcgggcatcaagcacaacgtgctgaacgcgaaattccacgccagcgaagcggacatcgttgcgcaggcgggctatccgtctgcggtaaccattgcgaccaacatggccggccgtggtaccgacattatgcttggcggtagctggcaggccgaggtcgcccagctggaagacccgactccggaacagattgcgcagatcaaagccgactggcaggttcgtcacgatgcggtactggctgcgggcggtctgcatatcatcggtaccgaacgccatgaatcccgccgtattgataaccagctccgcggtcgttcaggccgtcagggggacgccggttcttcccgtttctatctgtcgatggaagatgccctgatgcgtatcttcgcgtctgaccgcgtgtccggcatgatgcgtaaactgggtatgaagccgggtgaggctatcgagcatccgtgggtgaccaaagcgattgccaacgcgcagcgtaaagtcgagagccgcaacttcgatattcgtaagcagctgctggaatatgacgatgtggctaacgatcagcgtcgcgctatttacacccagcgtaatgagctgctcgatgtgaccgacgtgagcgagacgattaacagcattcgtgaagacgtatttaaagcgaccatcgatgcccatattcctccgcagtcgctggaagagatgtgggatattgaaggcctgcaggagcgtctgaaaaatgacttcgacctcgagctgccgctcaaagagtggctggataaagagccggagcttcatgaagaaacgctgcgtgagcgcattctgcagagcgccattgaaacctatcagcgtaaggaagaagtggttggcgctgagatgatgcgtcacttcgaaaaaggcgtcatgctgcaaacgctggactccctgtggaaagagcacctggcggcgatggactacctgcgtcaggggatccacctgcgcggctatgcgcagaaagatccgaagcaggaatataagcgtgaatctttctccatgttcgcttcaatgctggaatccctgaaatatgaagtgatcagtactctgagcaaagttcaggtgcggatgccggaagaggttgaagcgatggagcagcagcgtcgtgaagaagctgagcgtctggcgcagatgcagcagctgagccatcaggacgatgatagcgcagccgcggccgcgctggctgaacaaaccggcgagcgtaaagtgggtcgtaacgatccttgcccgtgcggttctggcaaaaaatacaagcagtgccacggtcgcctgagctaagcttttacaatattgaataccagggcgcagatatctgcgccttttttatggaatgaagacaatgaaaacgctgcaaatttcagtgggtattatccgtaattcgcaaggggagatttttatcactcagcgggccgccgatgcgcatatggcgaacaagcttgaattcccgggcggtaaaattgaagagggcgagtcgtccgaacaggccttagtgcgcgaactgcaggaagaggtcggcattacagctaaagcttacagcctgtttgataagctggagtaccagtttcccgatcgccatatcacgctgtggttctggctggtgaacagctgggaaggcgagccgtgggggaaagaagggcagccgggacgctggatggcgcagagcgcgctcgttgctgaggatttcccgccggcaaacgaacccgtcattacgaagttaattcaaggttctcagatcgggtagggtgcgcctgcatccggcaaatcagggcgggcctgcacatgcccgcccgaaatccgttactctttttcttcgctccagccgtcgctatctgacagatcgctgctgctcgggatacgtttctcttccgctgcccattcgcctaaatcgataagctgacagcgtttggagcagaacgggcgatgccggctctgctcattccagaccacaattttgccgcaggttgggcagttgacggttatctcttctgacatattgactccttaacagcaggccagttcaaaatcaaaacgctccggcacgatgccgtgctcgctgtccagcggcataaagcggatggcaaagcggctcttgtggcctgatatttgggggtagagctggctggcaagatccaaccgcagacgcagcagatcggcatcttcgccgttgtcctgataaaaaccgttcaggctggtctgcttacggaagggggccgagttacggatgagatcgagaatgagcatcagcgattgcgtcagcggttccaggctggccagccacttaccgacctgctcatcgcgatattcctgcggcatatgcagccagatgtgcagcgtcggaagatcgaagctacagcagccgcccgggatactcaggcgttggcgtaccagggcgatcaggcgatcctctcgcaggtactggccgatacgcggcgccgacattaacgtactgcctgattgcttcagctgctgacgcagttcgttgatacgatcctgatcaaccccagggacttccgcccaggattgcagcttcctctgctggcgatccagctctttcatcagatcggtacgtacttcaccgcgttcaaaaacatctaaaaggtcgccgatattgcggaaaaaatgcagcgcatccgcatggctggtaatggcgggatgtacggtcagctgctgaagcaaaaactcaatacgcagccaggtgcgcattttttcattaagcggatgttcaaatagaacaggggtagacattacggtttttcctgtgaggcggcctgcgctgccagctgttgatactttgcatgcaggcgggcgacagctgatgcgatggcatcaggtgaacccatattttcaataacatcatccgcaacggcaaggcgctgctcgcgcgttgcctgagcggcaagaatatgttccgcatgttgccgactgacccgatcgcgaagcatcgtgcgcgctatctgcgtctctttcggcacatcgacaacaaggacccgatcggctttggcggacaaacggttttcgaccagtaaaggtacaacccagagaatataagacgaggtggcaagctgcatctgacgacgcgtttcctgctgaatttgcgggtgcagcagcgcgtttagccagttcttatcctctgcatgagcgaaaatatgttcacgcagagcgcgacggttaagggtgccatctttgttcaggatctgcggaccgaagcgttgagcaattgcgtttagccccggggtgccgggctcgaccacctggcgcgcgataatgtcagcatcaataacgttaaccccgaggtgtgagaatgcgtcggctacggtacttttaccgctaccgatgccgcctgttaacgctaccgtgtatgtcatacacctcaatcctgaaactgactacatgcacatttttcaataacagagccgtgatttacgacgcgacgacgccactgcgatagtggctttatcgacgtgatatcaaccaataaatggctgtcaccacgtaccctggttctttttgcgcatgtaaatcaaatggttaaaaatgatacgcctgcgatgggatatcgcaaattcgcttttggctgttcaccaggtaaatttatacgattgtagcgtaaaaaaagtgaaaatcgcagtcttgcgcggccatgattcgtgcgtatgataacgtcactggagttgtgctctcacaataatgcaattaaccccaggaattcgcacatgcgtattgaagaagatttgaagcttggttttaaagacgttcttatccgcccgaaacgttctaccctcaaaagccgttctgacgtacagctggaacgtgaattcactttcaaacattctggccagacctggtctggtgtgccgatcattgctgctaacatggacaccgttggcacgtttgccatggctaaagccctggcttcatttggcgttttgaccgccgtacataagcattacagcgttgaacagtggcaggcgtttgttcagagcgtatcggcagatgtcgtgcagcacgtcatggtctctaccggcacctccgatgcggattttgagaaaacaaaacagattctgatccaaaatccgcagcttagctttgtgtgcattgacgtggcgaatggctattcagagcacttcgtgcagtttgtcgcgaaagcccgcgaagcctggccgcagaaaaccattattgcgggcaacgttgtgaccggcgaaatgtgcgaagagctgattctttcgggggctgatatcgttaaggtgggtatcggtccgggctccgtatgtacaactcgcgtgaaaaccggcgtcggctatccgcagctttccgcagtgattgagtgtgccgatgcggcgcacggcctgggcgggcagattatcagcgacggcggatgtactatgccgggcgatgtggctaaagccttcggcggcggcgcggatttcgtgatgcttggcggtatgctggccggtcacgaagagagcggcggtaccgtggttgaagaaaacggcgaaaaattcatgctgttctacggcatgagctcggagtcggcgatgacccgtcacgttggcggcgtagcccagtaccgtgcggctgaaggcaaaaccgttaagctgcctctgcgcggcccggttgaaaacaccgcgcgcgatattcttggcggcctgcgttccgcatgcacctacgtaggtgcttcacggctgaaagaactgactaaacgcacgacttttattcgcgtacaggaacaagagaaccgcgtgttcaacagcctgtaatgccgttcgctggcgcgtttgcgccagcgttatccccccattccgctaatggcgtcgcccagatgaaaaatgggtaaatacatcgccaccaccagcacgccgacaatcgttccggtcactaccaacatcatcggttccagcaaggtcgccagattatctgcctgctgatgcgtctgctcactatggtgacgagccagattttccagcatggtatccagcgaacccgaggcttcaccggtacggatcagttgtaggcaaagcggcgtgaagcctccgccgttggcgagcgcctgccagatgggatcgccgtgggtaatttgccggcaaacctgctggagcctctgccgccatagcgggcagctcagggtttcctccacgctttgcaggccttgcagaaagctgattccggcgctttgcgtcaatgcgagtacggtaaaaatctggctaagccgctggccgcatagcagtttgccaaacaccggcagcgtatggagcagcttctgacggtacagcagccagcctggccgctggcaaatcagccggttgagtattgcaggtaaaatacccagggcagcgagcagtggccaacagcgagttaacccttcgccaatgcttattaccgcgcgggtcagccacggcagcggggtgttgaaggtttgatatatagcggcgaactccggtaagacaaagcacagcattcccatcaccaccagcagcgccagggataagataatcaacgggtagcgcagcgcttttttcactttttcggtgaggagcagctgctctcgctgctgcctggccaactgagcgcagcaaagttccagtttaccggtaagttcaccggtgcgaatcatggccagatagagcggagggaacgcctcaggccatttttccagggagcctgaaagcgaaatgccctgcgccagatcctccgccagggtttgcagcagcgcctgccattgcgcattgggctgctgctgcgccagcagttccagcccctcggccagggggagaccggcctgaagaagcgcggccagctggcggatgatttcgccactgtagcgcggatgccagagggcgctttgcacgctacagcggcgcagcgtcagcgggataattcgctgccgctgcagagcctgcaatgcctcagtgcgattatcctgccagagcgttccctggcagggaatgccctggagagagagaccgcgccagcgccacagtcgtttagtcgccatgcggtatccccaacacgcgaacgacctcttccagacttgtcatcccacgttcgacggccagacagccgctctcaaacagcgtcatcatgccggattcgcgcgccagggactcgatctctccggcgctaagaccctgagtaatcgcctgccgtaacgcggtggtgacggggagcagctcaaatagcgccaggcgaccgtagtagccgtgatagcagtgctggcagcccggagcctgccagcgaggaagcgcccgcggccacaggctgtgtggaacatcggccgaactgccggtttcccggcggcagtgcgggcacagtttccgtaccaggcgttgagcaaccaccagagaaagcgcggatgagatcatccagcgcgcaacgcccatctgctgcaggcgaaccagcgtttcactggttgaattggtgtgcagcgttgagagaaccaggtgcccggtttgcgctgcttttatcgcaatttcagcggtttctgcatcgcgtatctccccgaccatcacgatatcgggatcctggcgtagcagggcgcgcagtacgctgtgaaaggttaagcccgcccgcggattaatctgcgtctgattcatccccacgatggggatctccagcggatcttcaacgctgcatatattgacctcgtcgcgattccgcgcctgcagcgcactatacaaagtgacggttttcccacttcccgtcgggccggtgaccagcatcagcccctgaggttggttaagcgccgagcgaaaggcggcaagctgctgagacgatagccccagcgcttcgaggtccagcgcttgttcgacctggtgtaataagcgaaggacgattttttccccgccgcggcagggaagcgtggcgatccgaaacgagatcgggcggtctgcgagcgtgagggtaaactgaccgtcctgcggtacccggtgttcagcgatatccagattgctgagcactttaagtcgggcggtgatgggggcggcgagttccggcgcaagcggcgcaagagaatggagtacgccatctaccctcaggcgaattctcaggcgatcgtcaccgggttcaatatgaatatccgatgcgcgctggcgcagggcctgttccagaaggctatttacctgttcaacgatgctggccgaggcttcaacaggcggggtgagggttgatattcccggcgtctgcagccgcttgtccatctggtcctggctccagcactcgatatcaatccttttctgcgtcgcgaaacgtaacgcttccagcagctccggggcgggggcgtcaaccacggcgatagcgatggtgtgttcattgctatcgagcagtaaggcctgatagcgctggcaaagaggtatcaattgttcagttttcattgccgcgccctcagttaaaacggaacacgtcttcacaggcctgcttgagtgcgctatcgccggtaatgttgcacactcgctgccagccggtgatgccgttagcgttatcccaggtcggcgtcagcgtgacgcttaagccattaaggctttcctgcccggtgagcgtgacaacgcctgtggcgacggtcatagccgaaacgtagcgggttgtggcgggcgagggaataccgttgctgccgccatcgcaggtggttaatccgccgtgctccagcgcgcacagctcaatggcggtgcggaacgggacgaaggtttgcagcatatcggtaagcgccgcttttcgcagatagttctgataagccggaatgccgattgcgctgagaatggcgatgatcccaatgaccaccataagttcgatgagggtaaagccgcgttgtttgtccataagttgctccttgttatcttcgggagcactttgccggggtttgtttagcgatacgagcggcagatcgcgcctggagaagcacgcttccaggctttttttgcgggttgcattgagggattattagcgtgcgagccggctcgcaaaagtgcgccccggcatcaacgacgaaccggggcaggggattagcggaagcgcatagagagatcgagagcgcggacgtgcttggtcaacgcgccaacggagatgtaatcgacgccggtttcagcaaattctcgaatagtctcgaatgtgacgttgccggagacttccagcgccgcctggccgttggtgtgtttgaccgcttcgcgcatcaggtcggtagtgaagttgtcgagcataatgatgtcagcgccggctttcagcgcttcatccagctcttcaagggtttcgacttccacctcaaccggcacatccgggtgcagccagaacgctttttcaaccgcctgccgtaccgagccggaagcgataatatggttctctttaatcagaaaggcatcggagaggcccaggcgatgattggccccgccgccgcacaggaccgcatatttcagcgccgtgcgcaggcccggcagcgttttgcgcgtatcgagcagctgagttttggtgcctgccagcaggtcgacatagcggcggacttcgctggccaccccggagagcgtctgcacgaaattgagtgcggtacgttcgccggtgagcaggatccgcgaagggccttccagctcgaatagcggctgattggcttttaccgcgtcgccatcggcaacgtgccaggtgaagttaacgtcgtcgcccgcaagctgaataaagacttcttctacccagcgtttaccgcaaaacacgccatcttcacgggtgatgacgacggcatgcgagcgcgcatcctgcggcaataattgcgcgctaatatcgttgttggcatccacttcaccgcctaaatcttcccgcagggattgagcgacggcatcggtaatatcaagattaatacgctccagcaacgcgtcacggcggcggtcgggattgtagcgacgaggcgtcatgataaagctccagatagataagattcagaagtgggaaacatgctaacctgaacaacgtttctgtaccacatccgcgtcctttcgccggcggcgccagcgtgaagttatagcgttagccaaccgagcaagcgtgggtatgatgccggggattgtttggtcacggtgccgcgaatgcataagctagtaaaaggagactcaacatgcagttgaacgggggatggctggaagaggcgcgtcgggttccttcgccgcaccacgatagccgcccggataatgaaaccccctctttgctggtggtgcataatataagcctgccgcccggcgaatttggcgggccatggattgatgccctgttcaccggtacgctcgatccgaatgcgcaccctttttttgctgaaatcgcgcatcttcgcgtttcggcacactgtctgattcgccgcgacggtgaaatcgtgcagtatgtgcctttcgaccagcgcgcctggcacgcgggggtttccagctatcacgggcgcgagcgctgtaatgatttttcgataggcattgagctggaagggaccgacgagctggcttataccgacgcgcagtatcagcagctggttgccgttacccgtcagcttatctcgcgctatccggcgatagctgacaatatcaccggccatagcgatattgcgccagtgcgtaaaacggatcccggcccggcttttgactgggtcaaatttcgcggtctgttaaccccgtcgtcagaataaggagatgccatgacgttgttcactacgctgttagtcctcattgccgagcgtttgtttaagctgggcgagcactggcagctcgatcaccggctggaagtgctgtttcgccgggtaaagcattattccctgctcaccaccctactgatgacggtcgcggcggcggcggtcgtgtttattattcagcgcctgctgcaggggcagctgtttaacattcctctgctggtgttctggatcctgctgggcctgctgtgcatcggcgcgggcaaagtccgtctgcactatcacgcctacctgaaggcggcggcgcgcgatgatagccgcgcctgcgacgccatggccagcgagctcaccctgatccacggcgtgccgcccggctgcgaccagcgtgaatatctgagcgagctgcaaaacgcgctgctgtggattaactaccgctactatctcgctccgctgttctggttcgttgtcggcgggccgtggggaccgttaaccctgattgcctactgtacgctgcgggcctggcagacctggctggcgcgttatcagacgccgcgtcatcgcttacagtcgggtattgacggcattctgcacgtggtcgactgggttccggtacgtctggtcggcgtggtgtacgcgctggttgggcacggggaaaaggctttgcctgcgtggtttgcctcgctgggcgacctccactcttcgcagtatcaggtgctgacgcgcctggcgcagtattcgctggcgcgcgagccgcatgtggataaagtggcgacgccgaaggcggcggtctccatggcgaaaaaaacatcgctggtggtggtggtgattatggcgctgctgacgatttacggtacgctgatttaagcacctgcccgctgggggcaggttccgcttttaatccgtatctgctgccgggatgccaaaatcaggcatcccgttttcgtcccagcggacaagcttcaggcgggtatggcgattcggatcgtacagcgggtcgccttcgatttcggtgtagttgcgcgcgtggtacaccagcacatcttctccctccggcgtttgcgtaaagctattgtgtccgggcccatactgacgattctcatagctggtacggaacaccggctgcggcgctttatgccagttttccggccgcagcgggtcggcgttaatgtctatccacaataagcccatacagtagttttcgtcggtggcgctggcggagtagctgacgaacagcttgtcgccgtggaacaggaccgccgggccttcgttcaccagaaaaccccggcactcccagtcaaactcgggttgactcagcatgaccggctgaccttttagcgtccacggatttgccagttcagccagatagaggttggtattacccttaatttccggatctttttgcgcccacaggtaccaccgtttaccctgatggtggaaggtggtggcatccagcgcaaaggtatcaagcggcgttttaatctggcctttttcctgccatttcccggttaacgggtcgctctccgcgcattcgagcgcgaacatgcggtgctggaacatgcccagcgcatccagatcgtgggtgtggctggcggcaaagtagatataccatttgccgtcaatctcatgcagctccggggcccatatgagctggctcatcgggccgctgtccggtttacgccagacgaccaccggctgcgcgtcgcgtaaaccttcaagggttgctgagcggcggatttccagacggtcatactccggcaccgaggcaataaagtagtagctctcctgatggcgcagaatatacgggtccgcgcgttgttcaataaatggattcggccagtttttcattacgctttccttacctgttcgccggttttcagttcctgatagtcgttgagttcgctgtagttgacccggcgtttctcgaggtcggactgaattagccgcataaattcgcggtttaccttcagcatacgcaccacccccgcggtaatcagatagccgatgccggggataacgctgaataacaatacgataccgttaatcgcggaggcgctttgctgcttcgcaccggcatcgtaaccgtaccaggagagcaggaagccaaccatcgcgccggcgatggccagaccgaccttcaggaagaacaggttgccggagaagctgatgccggtgatgcgtttgccggtcttccattcgccgtagtcatccacgtcggccatcagcgaccagtgcagcggcgaggggatctgatgcagaatgttcagcaggaagtagagcaccataatcatcatggtggcgtgcgggtcgaagaagtagaaggcgcaggagaaaatcgccagcacgatgttggtccagaaaaacacctgcagtttgcaccagcggtcggtcaggactttagccagcatactgccgatcatcattccgactaccccgaggctgataaatagcgtggcgaagtgggtgctttgctgcatcacccaggtgacgtagtacatggtggcggccatgcgaataaagcccggacaaacgttgcacagcgttagcagcaggatgcgaacccactggtcgtttttccagacgtctttcagatcttttttcagctcgtcgttggtctggacggcgggttttacgcgttcacgaacggtggcaaagcagaacaggaacatgcacataccgataatcgccagcacggtcatcgccatctgatagcctttggctttatcctcaccgccgaaccagtccgccatcggcagcagcgtcagggagagcaggagcgtggcgataccgaccatcacgaagcgataggactggcaggccacgcgttccttcgggtcattcgtaatcacgctacccaaggagcagtaggggatgttgatcgcggtgtaggtcagcgagagcaggaagtaggtgacgaaagcatagataaccttgctattgtacgaccactccggggtggtaaacatcagcacgctgaacagcgcgtacgggaaggcaatccacagcagccatgggcgaaagcgcccgtatttactgcgggtacggtcggccatcgcccccataatcggatcggtgacggcatcaataacgcgtacggaaagcagcaaaacgcccaccagcgccggcgcgagaccaaaaatatccgtataaaaatagttaacaaacaacatgatggcgccgaatatgatattgcatccggcgtcacccatcccgtagcctattttttctttaactgaaagcttattgccattcatcgcagcgatctccccgtggcggtatggagagaattattagccgggtaatggactaatgcgttgcaggatagggttaacgatatggataaatcggttatcagggggaaagtgtgaagcagataacaatgcgctgtgtccgccagcggcgggcggacacaggttgtggagatgcaggattatgctttaatggcgctggcggttttctgcttaaacaggtagccgacgccgagaacggcaatccataccgggataaggtagacggaaatcgccatgccaggggtcatcagcatgatcaccagcactcccgccataaacagcaggcagatccagttgcccagcggataaagcagcgccgggaagcgggtgaccacgccctgctgctgcttagcgcgacggaacttcatgtgcgccaggctaatcatcgcccagttgatcaccagggctgaaaccaccagcgccatcagcagaccaaacgcggattccggcgcgaagtagttaatcagtacgcacagcgcggtgaccaccgcggagacgaggatggtgttgaccggcacgccgcgtttatcgacgctcatcagcgcttttggcgcgttcccctgctgggccagaccgaacagcatccggctgttgcagtatacgcagctgttgtaaacggagagcgccgcggttaataccacgatattcagcgcattcgcgacgaaggtatcgcccagctcgtggaaaatcaggacgaacgggctggtatcggcggttacgcggctccacggcagcagcgaaagcagaacggccagcgagcccacatagaaaatcaggatgcggtagatgacctggttggtggccttcggaatgctctgctccgggttatccgcttcggctgcggtgataccgaccagctccagcccgccgaaagagaacataataatcgccatcatcattaccagcccggtgaagccgtgcggcaggaatccgccttgctcccacaggttgcgtacggtggcctgcgggccgccgttgccgctgaacagcagccagccgccgaacaggatcatcgccacgacggcgacgactttgatgatcgcgaaccagaactccatctcgccaaacaccttgacgttcgtcaggttgatggcgttgatagcgataaagaaaacggccgcagaaacccaggtaggaatttccggccaccagaactggacgtatttcccgaccgcggtcagctcggccattgcgaccagcacgtaaagcacccagtagttccagccggaagcgaagcctgcaaagccgccccagtatttgtaggcaaaatgactaaatgaaccggctaccggctcttcgacgaccatttcgcccagctgacgcataatcaggaaagcaataaaaccggcaattgcgtagcccagaataataccgggacccgcgttttggatgacggatgcgctacccagaaacaaaccggtaccgatagcgcctcccagcgcaataagctgaatatggcggtttttaaggccgcgctttagccgatcgccatgctgttgaccttccatcatgaatcctcgtgtgtggttatggctattatgtttgtccgcgtcatccatcaggtgacttcttcgctgtccatccctgcctgatagcatagtcagcgaatttctacggagcctgcgccccgttttgccccgagtgatgtagcgcacatattgttgtgtttgtgtaattatcaaattccgtagatgtacttatttctttacgcaaggcggagaggaaattcatgaaaaggcctttcgtatcatggagaatagtgataagcgccgctgaatgcacctgctttatgaagggatgatgacgaagcgagcaaaaagacgccatttgtaaatcccaccccatgcgccagtgcctacccactatttgtcatccatgcaaatttattgaatttatattcacttcatgaggagttgaatcggttcagatagcgtaatttttcgtttctattacgttaacgctacctctttgtgagtaaacacaacatttgtgcaaggttacatttttgaaatgttatttctgtaaggttgttaaaacgtgccgggtttaatgatttcaatcaaaacctgtatggacagaaggtgaatactttgttactttagcgatacgaactatgaattggtaagaccaattgactccgggctaatggcagagacagggaatatggcctacagcaagatccgccaaccaaaactatccgatgtgatagagcagcagctggagtttttaatccttgaggggacgttgcgccccggtgaaaaactcccgccagaacgtgaactggcaaaacagttcgacgtttcccgtccctcgctccgtgaggctattcaacgcctcgaagctaagggcttgttgcttcgtcgccaggggggcggaacgtttgtacaaagccgcctgtggcagagcttcagcgacccgctggtagagctactgtccgaccaccctgaatcccaatttgatctgctggaaacccgtcacgcgcttgaaggcatcgcggcttattacgcggcgctgcgcagcaatgatgaagaccgcgaacgcattcgcgagctgcatcaggccattgagcgggctcagcagtccggcgatctcgacgccgaatccgatgccgtcgtccagtatcaaatcgccgtcaccgaagcggcgcacaatgtggtgctgctccatctactacgctgtatggagccgatgctggcccagaacgttcgccagaattttgaattgttgtacgcccgtcgggagatgctcccgcaggtcagcaatcatcgtactcgcatttttgaggcgataatcgccggggaaccggagcaggcgcgtgaagcgtcgcatcgtcacctggcgttcattgaggaaattttgctggatcgtagccgtgagcagagccgtcgtgaacgctcactgcgtcgtttacagcaacgaaaagatgagaactccggttcttaagcgccatttttagagcgcggcaactaaacgcagaacctgtcttattgcacttttagttgttcaaaataattttgggtgtatcgcggcggcaagcgcgcgaatccccgggagcatagtgaactatgtgactggggtgaggaagcgaagccaacaaagagacagccagaagtatgaagaacaaagagcgcaatgggacaggttccagattaatcaacgattagatagataaggaataccccccatgtcagaacgtttaccaaatgacgtggatccgatcgaaactcgcgactggctacaggcgatcgaatcggtcatccgtgaagaaggtgttgagcgcgctcagtatcttattgaccaactcctttctgaagcccgcaaaggcggggtgaaagtggctgctggcgcatcgaccggcggttacgtgaacactattgccgttgaagatgagccggaatacccgggtaatctggatctggaacgtcgtatccgttctgcgatccgctggaacgcgattatgaccgttctgcgcgcatcgaaaaaagatctcgaactgggcggccacatggcttccttccagtcttccgcaaccttctatgaagtgtgctttaaccacttcttccgcgcacgcaacgagcaggacggcggcgacctggtttacttccagggccacatctctccgggcgtctacgcgcgtgctttcctggaaggtcgtctgactgaagagcagatgaacaacttccgtcaggaagttcacggtaaaggtctgtcctcttatccgcacccgaaactgatgccggaattctggcagttcccgaccgtctctatgggtctgggcccaatcggtgcgatttatcaggctaagttcctgaagtatctggaacaccgcggcctgaaagacacttccaaacaaaccgtttacgctttcctcggcgacggcgagatggacgagccggaatccaaaggcgcgatcaccatcgcgacccgtgagaagctggacaacctggtcttcgttatcaactgtaacctgcagcgccttgacggcccggttaccggtaatggcaagatcattaacgaactggaaggcatctttggcggtgctggctggaacgttatcaaggttatctggggcggacgctgggatgagctgctgcgtaaagataccagcggtaaactgatccagctgatggaagagaccgttgacggtgactaccagaccttcaaatccaaagacggcgcttacgtgcgtgagcacttcttcggtaaatatccggaaaccgcagcgctggttgccgactggactgacgagcagatctgggccctgaaccgcggcggtcacgatccgaagaaagtctacgctgcgctgaaaaaagcacaggaaaccaaaggcaaagccaccgtaatcctcgcccataccattaaaggttacggcatgggtgacaccgctgaaggtaaaaacatcgctcaccaggttaagaaaatgaacatggacggcgttcgctacgtccgcgatcgtttcaacgtgccggttgccgatgctgatatcgaaaaactgccgtacgtgaccttcccggaaggttctgaagagcacacctatctgcacgcccagcgtcagaaactgcacggctatctgccgagccgtcagccaaacttcgatgagaagctggagctgccgaccctggaagatttcggtccgctgctggaagagcagaataaagagatctctaccactatcgcgttcgttcgtgccctgaacgtgatgctgaagaacaaatccatcaaagaccgcctcgtgccgatcatcgccgatgaagcgcgtacctttggtatggaaggcctgttccgtcagattggtatctacagcccgaacggtcagcagtacactccgcaggaccgtgagcaggttgcttactacaaagaagacgagaaaggccagattctgcaggaaggtatcaacgaactgggtgccggtgcatcctggctggctgctgcgacctcctacagcaccaacaacctgccgatgatcccgttctacatctactactccatgttcgggttccagcgtatcggtgacctgtgctggcaggcaggcgaccagcaggctcgcggcttcctgatcggcgggacttccggtcgtaccacgctgaacggcgaaggtctgcagcacgaagatggccacagccacattcagtctctgaccatcccgaactgtatctcttacgatccgtcttacgcgtacgaagttgcggtcatcatgcacgatggtctggagcgtatgtacggtgagaaacaagagaacgtttactactacatcaccacgctgaacgaaaactaccacatgccggcaatgccagcaggcgccgaggaaggtatccgtaaaggtatctacaaactcgaaaccgttgaaggtagcaaaggtaaagttcagctgctgggctccggttctatcctgcgtcacgtccgtgaagcagcgcagatcctggccaaagactacggcgtaggctctgacgtttatagcgtcacctccttcaccgaactggcgcgtgatggccaggattgtgaacgctggaacatgctgcatccgctggaaacgccgcgcgttccgtacatcgctcaggtgatgaacgacgctccggcagtcgcatctactgactatatgaaactgttcgctgagcaggttcgtacttacgtaccggccgatgattaccgcgtactgggtaccgacggcttcggtcgctctgacagccgtgaaaacctgcgtcatcacttcgaagttgacgcttcctacgtggtggtagcagcgctgggcgaactggctaaacgtggcgaaatcgataagaaagtggttgcggaagccatcactaaattcaacatcgatgcagataaagttaacccgcgtctggcgtaagaggtaaaagaataatggctatcgaaatcaaagtaccggacatcggggctgatgaagttgaaatcaccgagattctggtcaaagtgggcgacaaagttgaagctgaacagtcgctgatcaccgtagaaggcgacaaagcctctatggaagtcccgtctccgcaggctggcgtcgttaaagagatcaaagtctccgtcggcgacaaaaccgagaccggtaaactgatcatgattttcgattccgccgatggtgcagcagccgctgcacctgcgcaggaagagaagaaagaagccgctccggccgccgcagcaccggcagccgccagcgcgaaagaagttcatgtaccggatatcggcggtgatgaagttgaagtcacggaaatcatggtaaaagtgggcgacaccatcgccgctgaacaatccctgatcaccgtagaaggcgataaagcctctatggaagtgccggcgccgttcgccggtaccgtgaaagagatcaagattaacaccggcgacaaagtgtccacgggttccctgatcatgatcttcgaagtggcgggcgcagcgcctgccgcggcgccggcgaaagcggaagccgctccggctgctgctgcaccggcagcttcaggttctaaagaagttcacgtgccggatatcggcggcgatgaagttgaagtgactgaagtgatggtgaaagtgggcgataaaattgccgctgaacagtcactgatcaccgttgaaggcgacaaagcttccatggaagtgcctgcgccgttcgcgggtaccgtgaaagagatcaaaatcagcaccggcgacaaagtctccaccggctccctgattatggtcttcgaagtggaaggcgccgcgcctgccgcagctccggctgccgcggctgccccagcaccagctgctgcaccggctcaggctgctaaaccagctgcacctgctgcaaaagcagaaggcaaatctgagttcgctgaaaacgacgcttacgttcacgctaccccgctgattcgtcgcctggcgcgcgagttcggcgtaaacctggcgaaagtgaaaggaactggtcgtaaaggccgtatcctgcgcgaagacgttcaggcctacgtgaaagaagcggttaaacgcgctgaagccgcgcctgctgctaccggtggtggtatcccgggcatgctgccgtggccgaaagtggacttcagcaagtttggtgaagtggaagaagttgaactgggccgcatccagaagatctctggtgctaacctgagccgtaactgggtgatgatcccgcacgttacgcacttcgacaaaaccgatatcaccgatctggaagcgttccgtaaacagcagaatgccgaagctgagaagcgtaagctggacgtgaaattcactccggtggtcttcatcatgaaagccgttgccgcggcgcttgagcagatgccgcgcttcaacagctccctgtctgaagatgcacagcgtctgacgctgaagaaatacatcaatatcggtgtggcggttgataccccgaatggtctggttgttccggtcttcaaagacgtgaacaagaagagcattaccgagctgtctcgtgaactgaccgtgatttccaagaaagcgcgtgatggtaagctgaccgctggcgaaatgcagggtggttgcttcactatctccagcatcggcggcctgggtaccacccacttcgcaccgattgtgaacgcgccggaagtggctatcctcggcgtctccaagtccgcgatggagccggtatggaatggcaaagagttcgtgccgcgtctgatgatgccgatctctctgtccttcgaccaccgcgtgatcgacggtgctgatggtgcgcgctttatcaccatcatcaacaatatgctgagcgacattcgccgcctggtgatgtaagcaaaaagccggcctgacggccggcttttttctggtaatctcttctgcgttttgaagttaccagcaataaaggacaaaatcgtttgccgtttgttgtttcaaaattgttaacaattttgtaaaatgcttgcggatagaacgtcccggtggacatgggcgtaaaaacaatagcgtcagacccgccggatacaaataacagaggtcatgatgagtactgaaatcaaaactcaggtcgtggtacttggggcaggccccgcaggttattctgctgccttccgttgcgctgatttaggtctggaaaccgtcatcgtagaacgttacagcaccctcggcggtgtttgcctgaacgtcggctgtatcccttctaaagcactgctgcacgttgctaaagttatcgaagaagcgaaagcgctggccgaacacggcatcgttttcggtgaaccgaaaactgacattgacaagattcgcacctggaaagaaaaagtcatcactcagctgaccggcggtctggctggcatggccaaagggcgtaaagtgaaggtggttaacggtctgggtaaatttaccggcgctaacaccctggaagtggaaggcgaaaacggtaaaaccgtcatcaacttcgacaacgctatcatcgcggcgggttcccgtccgatcgaactgccgttcattccgcatgaagatccgcgcgtatgggactccaccgatgcgctggagctgaaaaccgtaccaaaacgcctgctggttatgggcggcggtatcatcggtctggaaatgggtaccgtataccatgcgctgggttcagagattgacgtggttgaaatgttcgaccaggttatcccggctgccgataaagacgtggtgaaagtctttaccaagcgcatcagtaagaaattcaacctgatgctggaaaccaaagtgaccgccgttgaagcgaaagaagacggtatctacgtttccatggaaggcaaaaaagccccggctgaagcgcagcgctacgacgccgtgctggtagctatcggccgcgtgccgaatggtaaaaacctcgatgccggtaaagcaggcgttgaagttgacgagcgtggctttatccgcgttgataaacagctgcgtaccaacgtgccgcacatcttcgctatcggcgatatcgtcggtcagccgatgctggcgcacaaaggcgttcacgaaggccacgttgctgccgaagttatcgccggcatgaagcactacttcgacccgaaagttatcccgtccatcgcctataccgagccggaagttgcgtgggttggtctgactgagaaagaagcgaaagagaaaggcatcagctacgaaaccgccaccttcccgtgggctgcttctggccgcgccatcgcttccgactgcgctgacggtatgaccaaactgattttcgacaaagaatctcaccgcgttatcggcggggcgattgtcggcaccaacggcggcgagctgctgggtgaaatcggtctggcgatcgaaatgggctgtgacgctgaagacatcgcgctgaccatccacgctcacccgactctgcacgagtccgttggcctggcagcagaagtcttcgaaggcagcatcaccgacctgccaaacgcgaaagcgaagaaaaagtaaatttttctttcaggcaaaatccaaaaagcggctcagtgagccgctttttttatcggtgatgtttagaactgtgtcgccgttaataaaattgcatatcttattaatactttaaaaatagttactcagtaaacttataggtagttaactatatgtgaggtgtgtgatgaaaaaagttttaacgacgacgctgctggcagcaacgctggtctcgggtatggcctgcgcggccgatgccgcgattccctgggctgataacagcggcgggaccgaaagcacccatattgcggcgatgggccaggatttgaatatgcagcatcagcagataacaaagaccagcgaaggggtatgggcggcgaattccggcagcatcagctctgatgaagcggcgttgaccagcactaaaccggcttttgcgggtgacccgtctctgatgccccatcagggctaaatcagcacacagatatggcccggcggcgttatcgcacgccgggcttttttctattgattgatggcctgccaggctgaatccggcgaaaactgcgaaattgcgcgcgctttgctctgcgtctcatcccctaaattagcctgataaacctcatcattctggttgaccataaagctcatgatgccggtttttccccattccacaggccacgccagcagggcgaagccctgaccctcgccatcttgaatgatgcgaaaacggtagccgtgatagccttctccgggttcggcggggctaaacgcgggcccaagcgggctgggcgcttcgccgggagcggcaggccagtagaggccgtctttcttgccatcgctgctgataatcctctgcgcccaggtgtggtttagccgataaaaatcctgctgggcatcaacgtaagcgtgcatcgcctgaatggctgacagctcattgcggccaatcgcgcgagtcaggatctcatcttcagcagcggccatatcaaaacgccagccgctcttatccttaatgatggggatcggtagccgccatgcttcctgtcccacctccagccaggcgctattctgctgctgaacgatacgatggctgactttccagtcgcgctgaaagcgagcgacggcatcagggtcgatgccctccggcggtaaaaattgctgccagctatcgccgagcagcccgttgagggcagattcatcatgcctgccgattgcctcagccagcgcgcttgcggcctgttccggagaggaaaactgctgctgagccagcgccatggcgggcgtcagggccagcgccagcagcgtcatttttaataattttttcatctgattatcctcagcggcggcgcagttcacggtgttcggaaagatgttctctggccgcgctgcgctgctcgctgcttaaacccgagatatggcggctctgcaggccgcgctcctgctgagactgccaggagggagagcggatatcgttaccgctcagggcattggcgtgcagattattcagcttctgctgacgttgttcgggcgttgcggcccggaactgttcacggcgctgttgctgctgcgccgtcggatgctgaatttgcgttttgaccgcttcccgatgctgctgttgtacggcgctattttttaccgccggcgtggcgtcatagccgcgatagttattgcgctgggtcacctgatggagctgctgcgacgcggcctggcgctgggcatcgcgggaaggcgcgtgattaagcgcgttatccgcaggcccggtacgctgctgtagttgcgtcatggccgcctgacgctgcgcgttgcgatcggcgggctgatgttgggtcgcgctaaggccgccgggaacattggtctgatggtaatgctgcgcaatcgtattgttcggatagggaatattgccgcggtaggccggattatgctgccagctggcgtggtttcccggcaggttctgcccggtaatatggttgaaattattgacgttgatgttgatgttatcgccgttgtgcgcgtagccgccgtgatgatcatcatcgtgatggtgatcgtcatcgtcatggtggtgatgatcgtcatcatcccagtcgatgctgctgaacagagcgtaggttgtggcgacgccgaggctatagccaaaccccttgacgaagctgtcggtaaactgctcccccggaggcggcggcaggtagaccggcggataggcggtgtcaggccaggcgccgtaaacaactgaagggttataggccggcacgtacaccacatttggattggtggattcgattttaatcacctgcgccggggcggaggatgtcacggcgctgctgctgctgcgggaagcggtggccgtggacgttgccgaagccggtgccgcggagcgggtggcggtgatgactttctgctgcggcgtggattttaacgttccggtctgctgggcgatggcgcgtaagcgctgcaccgaatccatgacggcctgcggctgggcgagaaaggcgttacccaggttttccacccacggcgcattttctcccattaacgcgagaagggaagggaaggcgaccagcgattttacgctgggatcccagggctgatttgccaccgcttgcaccgccgcgtcgcccttcattgtggggttatcctgcgaccactctaccgcctggacaacgttactcgggtaggtcgaagccatcagcacctgcgacagcagattgtccggatagagcgcgattggcgcgacccactggtctatctgcgcgggtgtataggtcgtggtcaccggctgggcggcggcggttgcctgcgccgtctgcgcaacggcggggggctcgggaaccgtttgcggctcccggcttttgacgtagagcgtacccgcggcggctaatagcccggcgctacagagcagcgcgagcagatggggtttgaaaggcagtgtcatgagaactcccggcacaataattggcccgttttgacagagtattgtcgaaaagcgggggattgcctgagtatagagagcgcgtatttgcgtttttgattttagttgggatttcgctcaattatgtgtaacagaattaattttatataccgctaaattgacagaaaacctgcattattctgcccttaacgattcagctaatttttaatgttgcttttttgtaaacagattaacaccccgccaaaatcctgctatgctgccgacgcggtatcgggcatttaccctacaaactgctgtctcacaggagcgtgaagagaatcgcctaccgcattttacaatgagagcgaggagaaccgtcgtgctagaagaataccgtaagcacgtagctgagcgtgccgccgaggggattgtaccgaaacccttagatgcaacccaaatggccgcgctggtagaactgctgaaaaacccgccagcgggtgaagaagaattcttgttagacctgttaattaaccgcgtaccgccgggcgtcgacgaagccgcctatgttaaagccggattccttgccgcgatcgccaaaggcgaagcgacttctccactggttacccgtgaaaaagctgtcgaactgctgggcaccatgcagggcggttacaacatccatcccctgattgacgcgctggacgacgcaaaactggcgccgatcgccgcgaaagcgctgtcccacaccctgctgatgttcgacaacttctacgatgtagaagagaaagccaaggcgggcaatgcctacgccaaacaggttatgcaatcctgggccgacgctgagtggttcctgagccgtcctcaactggctgacaaaatcaccgtgaccgtttttaaagtcaccggcgaaaccaacaccgatgacctgtctccggcccctgacgcctggtcccgcccggacattccgctgcacgcgctggcaatgctgaaaaacgcccgcgaaggcatcgacccggatcagcccggcgccgttggcccgattaaacaaattgaagcactgcagcaaaaaggtttcccgctggcgtacgtcggcgatgtcgtgggtaccggctcatcgcgtaaatccgccaccaactcggtgctgtggtttatgggcgacgatattccgcacgtgccgaacaagcgcggcggcggtctggttctcggcggcaaaattgcgcctatcttctttaataccatggaagatgccggcgcgctgccgattgaagtggacgtaaacaacctgaacatgggcgacgtgatcgacgtttatccgttcaaaggtgaagtccgtaaccacgaaaccggcgaactgctggcgaccttcgagctgaaaaccgacgtgctgatcgacgaagtgcgcgccggcggccgtatcccgctaatcatcggccgtggcctgaccaccaaagcgcgtgaagcgctgggtctgccgcacagcgatgtgttccgtcaggcgaaagacgtggcggaaagcagccgcggatactctctggcgcagaagatggtggggcgcgcctgcggcgtggccggggttcgtccgggcgcttactgcgaaccgaagatgacctccgtaggctctcaggacaccaccggcccgatgacccgtgatgagctgaaagacctggcgtgcctgggcttctcttccgacctcgtgatgcagtccttctgccataccgccgcctatccgaagccggtggacgtcaccacgcaccacacgctgccggacttcatcatgaaccgcggcggcgtatcgctgcgtccgggcgatggcgttatccactcctggctgaaccgtatgctgctgcctgataccgtgggtaccggtggtgattctcatacccgtttcccgatcggtatctccttcccggcaggctcaggcctggtggcgtttgccgccgcaactggcgtcatgccgctggatatgccggaatcggtactggtacgttttaaaggcaaaatgcagccgggcatcaccctgcgcgatctggtacacgccatcccgctgtatgcgatcaaacagggtctgctgaccgtggagaagaaaggtaagaaaaacatcttctccggccgcattctggaaattgaaggtctgccggatctgaaagttgagcaggcgtttgagctgaccgatgcctccgccgagcgttccgctgcgggctgtaccattaagctgaacaaagagccgatcgttgagtatctgacctccaacatcgtcctgctgaagtggatgatcgccgaaggttacggcgatcgccgtacgctggagcgtcgcgttcagggcatggaaaaatggctggcggatccgcagctgctggaaggcgacgcggatgcggaatatgcggcggtgatcgatatcgatctggccgatatcaaagagcccatcctctgcgcgccgaacgatccggacgatgcgcgtttgctgtccgacgtgcagggcgagaagatcgatgaagtgtttatcggttcctgcatgaccaacatcggccacttccgcgcggccggtaagctgctggacaaccacaaaggccagctgccgactcgtctgtgggtggcgccgccaacccgtatggacgccgcgcagctgactgaagagggctactacagcgtgtttggtaagagcggtgcgcgtattgaaatccctggctgttccctgtgcatgggtaaccaggcgcgggttgccgacggtgcgacggtggtctctacctcaacccgtaacttcccgaaccgtttaggtaccggcgctaacgtcttcctggcctctgcggagctggcggccgtggccgcgcttatcggtaaactgccgacgccggaagagtatcagacctatgttgctcaggtggataaaaccgcagcggatacctatcgttatctgaacttcgaccagctcggtcagtacaccgagaaggccgatggggttattttccagaccgcggtgtaatgcgctaactcagcgctgtacataatcccgccaatgcccggtgaactttgcgtcaccgggcatttttatttcccgtccctccgtccaccacgctttttttctcttccactgctgcgataatgactgtatgggtacagtgcagcggtgacgcactgcccttgcagaggaaaagactatggattacgaatttctgcgcgatattaccggagtggtaaaggtgcgaatgtcgatggatcatgaggcgatcggccactggttcaacgaagaggttaaagataaccttgccctgctggacgaagtcgagcaggccgcgcgcaccgttaaaggcagtgaacggtcctggcaacgcgtcggccatgaatacacgctatggctggacggcgaagaagtgatgatccgcgctaaccaactggatttttccggcgatgagatagaagaggggatgagctactatgacgaagaaagcctctcgctatgcggcgtggaagactttcttcaggtcgtcaacgcctatcgaaaatttgtaggtcaatcctgagcaacgttaatcatttccacggccggacagttatgtccggcttttttttagccttaacggcctggtttgatttttattaatcattttaaaactgtgatctggcgcgtttgtgaagtttatttgattgaatataatctttatgattttatttaatcacagcataacaacaggcgggaagaccatgaacatcaaaaaggctatagaacgtgtacctggcggcatgatggttgtgccactggtgatcggcgccattatcaatacctttgccccgcaagcgcttgagatcggcgggttcaccaccgcgctgtttaaaaacggcgcagcgccgctgattggcgccttcctgctctgtatgggggcgggaattagcgtcaaggcagcgccacaggcgctgttgcagggcggtacgattacgctgaccaaactcctggtcgccattgcgattggcctcggcgtggaacaactctttggtgctgaagggatcttcggcttaagcggcgtggcgatcatcgctgcgatgagtaactcgaatggcgggctttacgccgcgctggttggcgagtttggtaacgagcgtgatgtgggagcgatctccatcctgtcactgaatgacgggccattctttacgatgatcgcactgggcgcggcggggatggccaacattcccattatggcgctggtcgccgtgctggtgccgctggtggtgggaatgatcctgggtaacctcgatcccaacatgcgcgacttcctgaccaaaggcggcccgctgttgatcccattcttcgcttttgcgctgggcgcagggatcaaccttgaaatgctgctacagggcggtctggcgggcattctgctcggcgtgctgacgaccttcatcggcggtttctttaacattcgtgccgaccgtctggtgggcggaaccgggattgccggcgcggcggcgtccagtaccgccggaaacgccgtggcgacgccgctggcgattgcccaggccgatccctctctggcagaggttgccgccgcggccgcgccgctgattgccgcatcggtgatcaccaccgcgattctgacgccggtcctcacctcatgggtggctaagaagcaagcgcgtcaggttgcagaggagaaaaaagcatgaaaatgatcgttatcgccgacgactttacgggttctaacgataccggcgtgcagctggcaaagaagggggcgcgcacggaagtgatgctaacgccagatcaaaaaccttcgcgtcgcgctgatgtgctggtgatcaacaccgaaagccgcgcgatgcctgcagctgaggccgggaaagcggtagcgcaggcgttagcgccgtggtgcgatggtgatgcgcgtccgctggtttacaagaaaatcgactccactttccgcggtaacgtgggggctgaagtgacggcggcaatgcgtgctgcaaaccggaagctggccgtaattgcggcggctatccccgcagccgggcgtaccacccgcgacggattatgcctggtcaacggtacgccactgctggaaaccgaattcgccagcgatccgaaaacgcccattatctcctcacgcattgcgacgttgatcgccctgcaaagcgatatcccggttcatgaagtgtcgctcgaagacgttcgtcgggggcaattgagcgccctgttgacggctttttcagccgagggtgagtgcatggtggtggtggatgccgtggaagatcgcgatctgttgctgattgcccaggctatttgtgaacaaaaagagatgccgctgttggtgggcgctgccgggctggcgaacgcgctaccggtcagcaccttcatgcaggaaaagcaggagctaccggtactggtggtggccggatcgatgagcgaggccacgcggcggcaggttgaaaaagcgctctgccaggcgcgcgccagggtcgtggatattgatgcctcgcggctggcctcggcccagtacgagcaggaaatggccgcggcggttgaacaggcctgtgcgctgctcggtcgccagcagcacaccattttacgtaccagccggagtgcggacgatcggcagatgatcgacggcctgtgcgctcaggctggcgtaagccgccagcagctcggtgagatgcttagcgaacgcctcgggatgattacgctgcgcattatcgaacaggctcgtattggcgggctcttcctgaccggaggagatatcgccaccgcggtcgccgccgcgctcggggcggaaggctatcgcattcagagtgaggtggcgccctgtattccctgtgggacgttcgttaacagtgaaatcgacgatctgccggttatcactaaagccggcggattcggttcagacagcaccctttgtgatgcgctttattttattgaggagatgtacagtggtaactaaaacaattgcgattacgatgggcgacccggcgggcatcggtccggaaattattgtcaaagcgctttgtgaagacgagctcaacggcgcgccgctggtggtggtcgggtgtctgaaaaccctgaaacgtctgcaggacaaagggctggccgaaggcgtcacctttcgcgcgatcgccgaggtcgcggaggcgcgatttgctcctggcgtgattcatgtcattgacgagccgctggcccagccggacgcgctggagccgggtaaagtgcaggcccaggcgggcgatctggcctaccgctgcgtgaagcgggcgacggcgctggcgatgaaaggcgacgtacacgccatcgcgaccgcaccgctgaataaagaagcgcttcatctggccgggcacaattatcctggtcataccgagctgctggcgacgctgactgaaagccgcgattacgccatggtgctctacaccgacaagctgaaggtcattcatgtctcgacccacattgcgttgcgtaagttcctcgatacgcttaatggccagcgcgtggagacggtcatcggcatcgcggatcgcttcctgaaacgcgtcggcttcacccagccgcgcattgccgttgccggggtcaatcctcatgcgggcgaaaacggtctgtttggcgatgaagaaatacgcattgtgtcgccggccattgaaaacatgaaagcgaagggaatcgatgtttacgggccctgcccgccggacaccgtgtttctacaggcatacgaggggcaatatgacatggtggtggcgatgtaccacgatcagggacatattccgctcaaactgcttggcttctacgatggggtgaatatcaccgcgggtctgccgttcatccgcacctctgccgatcacggcaccgcgtttgatatagcctggacgggaaaagcaaaatctgagagcatggccgtatcgattaaactggcaatgcaactggcgtaatttcctgttatgaaaggacaacaccgtctggataagattgtagcgtatttgaaaaatcatacgctggtgaccgtggaacagctggtggatgcggtagaagcatcgcctgcaacgatacgacgcgatctgatcaaactggatgagcagggcgtgatcagccgcagccacggcggtgttgccctgcggcgctttgagccttctcagcctaccaccaatgaaaagcagctacgatcgcctgcggaaaagcgggcgattgcgcgttttgccgcctcgatggtgcaggcgggcgacgcggtggtactcgacgccggcaccaccatgctggagctggcaaaatgcctgacccatcttccgctcagggtgatcacagtcgatctgcatatcgctctgtttttatccgagttccggcagatagaagtgaccatcgtcggtggccgcattgatgacagcagtcagtcctgtatcggcgagtttggtcgtaagatgttacgtagcgtctatcccgatatcgcttttatgagctgtaacagctggagcgtggaaaagggcgtgacgacgccgacggaagaaaaggcggggctgaagcaggagatcattgccaacgcccagcgtaagatcttactggccgacagcagcaaatatggcgcccactcgctgttcaacgtcgctccgctgggccgcttcactgacattattaccgatgtgagtctgcctcttcccgttcaggctgagctgaaagcgcagtccgttgcccttacgctggtacagcctgaacgttaaggataccgccagccgatacggtgttacacgctcggtatattacgtccgtagtagatttcgcgcatctctttccagagcaggtcggtaatcaccttacgctcctcttcgctcaaatcttccggcttcgtgtggaacatatagtgcttaaggtcgaactccttaagcaacatcttggtatggaaaatattttcctgataaacgttcacgtccaccatgtcatacaaagacttaatatcttcggacatgaagttctgaatggagttaatttcatgatcgatgaagtgcttcatgccgttcacatcgcgggtaaaaccgcgaacgcgataatcaatcgtgacgatatcggattctagctggtgaatcagatagttcagggccttcagcggtgaaatgaccccgcaggttgagacttcaatatcggcgcggaaggtgcacagtccgccctcaggatggctttccggataggtgtgaacgcagatatggcttttatcgagatgcgccaccacggtttccggtagcggacccgggtgttctgtctgatcgataagctgcggatcgactggctcttcgctgaccaggatcgtcacgctggcgccctgcggttcataatcctggcgggcaatgttaagaatattggcgccgataatcgaacaggtctctgacaaaatttccgtcaggcggttggcgttgtagagttcgtcaatataggcgatgtagccatcgcgctcctctgccgtttttgcgtagcagatatcgtaaatgcaaaaactcaggcttttggtcagattgttaaagccgtgcagcttcaattttttcaatttagatcacctccttacttaacggtggatagcgcatccagtaaatactgcggtaaagcaaatgccgccgcgtgaatggccggattgtaataacggcacttcaggttcgacttgtgaaaacgggcctggatgatttcactggaaagatggcgcagcgcttcgttgtccgtggcccatgcgaaggtcatgatgccgccgtagtaggtgggaatcgccgcctgatagaagcttacgtcgctaaagtaatggctgagcttgcgatggctatcgacggcctcatcctgttgcaggaagctgacgccgttctgagcgacaaagatcccgcctgggttgaggcagcgcttgcagccttcatagaaggcggaagtaaacaggctctcgccgggaccgataggatcggtgcagtcggaaataatgacgtcaaacatttgcgccgtctggttaacaaaattgacgccatcgtcaatcaccagggtaaagcgcgggtcgtcgtacgcacccgcattatggttggggaggtactggcgacagaatgaaaccacgccagcgtcaatttctaccatggtgatggtttcgacgctgcggtgacgggagacttcgcgcagcatggcgccatcgccgccgccgataattaacacatgtttcgcctggccgtgggccatcagaggaacatgggtcatcatttcatggtagataaactcatcacgttcggtggtttgtaccacgccgtccagcgccatcacgcggccaaaggctgcgttttcgaaaatgattaaatcctgatgatcggttttctcatgatacagaacgttatcaacgctgaaatactgaccaaaatggtcgtgcagcgtttcatgccacagattgctatcggccacgggcagatcctcctttgttaacacctgttacacccattaaaaatgagcgcaacatcatagccaactatagaagatgatgcacggtggatatttcagcaaatgaagcgtggagcattacccgttcacaaagaggggaaagcgcctccccgatgggaggcgccaggatcagggttttttagccagtggttctgccgcagtggcgtcaacgattctgacggtatataccatggtcgctcccggcgggattttaggcggcttgccttcgctgccgtaggcgagattgggagggatcacgaccgttatcgctccgtggtttcccagccgcttgagtggcccaaggaagatgggaggataagatttcagaggctgggaccagactttcccctccgcttccatatcgttaatgacggttccgtcggtaagcgtttccttgatggtgacggtaacgatatcgctgtcgagaatcttgcccttgccggcataatctatgcgactgtaaatgccgtctttcaataccacccctttttgcttcgcgaagttttgttgatatttctttccttcgctaagggtttgctgttcgagcttctttaggttctgaaagacttttttagacacatcgaataaggctttattgcgcgctttctcatcaagggcgatatcccctgaaaaagaatccataatcccctgtaaaacggtatctttactggtttttacgccctgagatgcccgggtagataagagctgcagcacctcctcgcccatcgatacgccgatagcgtaagcctgccgcagaggctcttttgcaaagtcgatagccagcggctttttcgcctcggcgtcagcaagcctggcctttagccgggtaatttcatcggcgctggcctgctgtagggcgtggtcttgatcggcctgctgacggacagcatccgcctgaagggacggctggggcttactgatgataacggcgtctagtttagccgtgagcgcctgtttttctactgccgcggccgccagctttgtcgttaaatctgttttttccgcttcactggcggcgagcttcgctatcgctgctttctgctcggcttgagacgcatcgagtttcgtttgcagcgcccgctgtgcggcgtcagccgcggcgagttttgtcagcatttcctgctgatctgcctctgcagcagcgagccttgttgcgagggcttgcctctctttcgcctctgtcgtgaacttaccggtgagcgcttgtttctccgctgcggccgccgccagctttgagagcgtatcctgcttttctgtttccagcgctgcgagcttctgctgcagggattgcttttcggcggttgcctcagccagctgacgctcaactttttgtttcgcggattctattaatgccactcttttttcctgctgcagcgttttattttctgtggcattacgctgaccttcaatctgttttatttcagccgcggcggatagcgcgttatctattaattgttgtttttcggctacggcagtcgctaactttttctcaagcagctgaattttatccttcagcgctttttggttgtctgcttcggcgttcatcatggccggcttcgcatcaagctgctgccgaagttggcggatgagtttatctttttgagcaattattgcagcctgacgggaaacttcatgggtattcaggacggtttttttattcgttgtttttgtattattgcttttctcctcaacgggctttaccggctcgctgattttttgcgcctgatgctctttagcataatttaaaaatgccgggcctgaagcatcgctatttgagcttgccgtgacgctaataagggcatctttttccgcatagacatccggcgatagcgccagcacaaaaactgctgccagcgataccggattgaagtttttggctattttcccgttcatggctgaacattttcaccacgtttaacaaggctatcgatcagctccttttcaatatcagcgcacagcttgattgatttgaactggtacatcgaatcgatcccctgttttgtcggttctgccactttactgcgcacagaattatattgtgatgccgcgctaagcagggcagtgaactcattgccgagtttgtccgcctgtttggggttcacttctttcagcgactccagcgctttacggcaagtgtctaaacgcgcttgctcatcggcgattctctgctgttcggtttgctgttggcttaatgtcgactcagataagggtttcactaatccggcggattgcctggattgtattgaattacaacccgctaataaaatgagggccagaggcgctatgcttgtaaataaggatctgttcaaggtttcattccattgataaaaagaggtgttatcgggcgataatagtgtgcgaaaaagaagattgcaataatagagtttatgatttttgatggcgtacttttaatattagttatacccgtcatatttcacgctgcttatgcgttggctacgctcgctcaccccttgccgccttcaagtaactctaattatttagggtatatattaatatgttgaatgcttaatgaattatcattgaattctatgaattgagatataaattaagtgctgttgttaattgaattgctattattacgcggcgccatagccgtattcgcacggctaccgtattatgaaatgaagggggggctatttcacgtaagcgagcaggctaagcgaatcgcgggccagcgctttgcattttttagtggtgggaatctggattccgctaaggtcccggtagctatcttcgccgagcgctttcatattgaagctgtcgtaattgcttaaatcccattgattctgctgagcaaaaaagaccagggcacggcgaatctgcgtgttaggcagattttgataaccgcagtcgttcttcagaaagacgaatactgccgttaaatcagccatatcttccgcttcggactcgcttaatgcatagctattggcggagagagtcagcaggctgccaagcactattgttctgaaaagcgtcttcattttttctaccattgaatcacggacaaacaaagttagcacacttcgttacagtgcgccgagctttattcttactcttctgcttgaccttcctgttgggggagggtttaagctcaattattcaccagcagaataaaaaggatgtgaaaatgcaacgtcgtgagtttcttaaactaaccgctgcggtcagcgtggccagcgcattgccgctatggagccgctcggtttttgccgccagccgcccatctttgcctgtacccgaactgcttaccgccgacgcgcgcaatcgcatctcgttaatcattcaggctggaaaaacgcagttcggcccgcatctggcgaccacctggggctataacggcaatctgctgggcccggccctacagcttaagcagggtgaggaggcgaccatcgatattcataaccgtctggcggaagagaccaccgtgcactggcacggtctggaggttcccggcgccgtggacggcggtccccagggcgtgattgccgccggaggctcccgcacggtgacctttaccccaacgcagcgggcggcgacctgctggttccatccccatcagcatggcaaaaccggcagacaggtcgcgatggggctggcagggctggtgctgatttctgatgcagaaagcgaaaagctgctcctgccaaagcagtggggaattgatgatgtcccggtgattgtgcaggataaaaaattcacctcagcgggagagattgattatcagctcgatattatgagcgcagccgtgggctggtttggcgatacgctactcactaacggcgcgctgtacccggagcacgctgcgcctcgcggctggctacgtttacgtctgctgaacggctgtaatgcgcgttctttgaatttcgccaccagcgataagcggcccatgtacgtcgtggcaagcgatggtggtcttctggctgagccggtgaaagttaacgcgctgccggtgctgatgggcgagcgtttcgaagtgctggtggataccactgacgggaagcccttcgatttaattacgctcccggtcaaccagatggggatggcgatcgctccgtttgatcggccgcagccagtgttacgcgtgcagccgctgactatccaggcttccggtaagctgccggatgtgctggccgctatgccagcgctgccctcgcttcagggcctgactcagcgtactttgcagctctcgatggatccgatgctcgatatgatgggcatgcaggcgctgatgcaaaaatatggcgaccaggccatgtccggcatggaccatggcatgatgatgaatcacggagagatggggaatatgaacaatatgaaccacggtgacatgggaagcatgaatcatggcggcacggcgcagatgaagcacggtaataaggagtttgatttccataatgctaatcggatcaatggtaaagcctttgatatgaatgttcccctgtttgcggcggcgaaagggcagtatgagcggtgggtgatttctggcaaaggcgacatgatgctgcatccgttccatattcacggcactcagttccgtattttgtccgaaaacggcaaagcgccggcaccccacaggagcggctggaaagataccgtcagggttgaaggcgatgtcagtgaagtactggtgaaatttgatcacgatgcgccgaaagaacatgcctatatggcgcactgccatctgctggagcatgaagatacgggaatgatgctgggttttacggtgtagaattcgcttcccgtctaagggcgaggcgtgtggcttgtttcgatagaaaagagagagacgtaccatagggagaaggcccggaaaccgggccttctgttttttacttcgcgtcgtccggtaaagcataagcgacgatatagtcgcccatcttcgtgccaaacgaaccgtgaccgcccgcagagatgacaacgtactgcttgccattcacttcataggtcatcggcgtcgcctggccgcccgccggcagacgtgcctgccataatttttcaccgttgctcatattgtacgcgcgcaggtaattatccgcggtcgcgccgataaacagcacattgccggccgtcgagattggaccgcccagcatcggcatacccattgtgaacgggagcttaatcggcatcgggaacggcaggctatcctgcggcgtaccgatacgttttttccacaccacttcgttggttttcagatccagcgcggagatatagccccaggctggctgtttgcagggcagaccaaacggtgacaggaacggattaagcgtaacgccgtaagggacaccgtactgtggctgaataccggcttcggtaccggaacccttggcgtctttaggctgctccatcgggttacctgggccgcgagggatcagttttgagacaaacggcagcgccatcgggttagcaatcgccacctggcggttcggatcgacggagatgccgccccattcgaacatccccaggttacccgggaataccagcgtgccttgttctgaaggcggggtgaaaatcccttcgtagcgcagctgatggaagataacgcggcacaccagctggtcgaacatggtggcgccccacatgtccgcgccggtcaggtctttcttcggacggaagctcaggtcggagaaaggctgagttttcgcgacgtagtcacctttcgccgccccttgcggaaccggtttttccggtgccgggacaaccagttcaccgttgcggcgatcgaggacaaaaatattaccggtttttgccggagcgtaaatcaccggcacggttttaccgttgacgtcgatatccgccagcgtcggctgcgacggcatatccatatcccacagatcgtggtgaacggtctggtagctccacgccagtttaccggtcgtggcgttcagcgccacgatggagctggcatagcgctcttgttcaggcgtacggttgccgccccagatatccggggtggttacgcccataggcaggtagaccagatccagcttcgcgtcataggccgctggcgcccaggagtttggtgaattcagcgtgaaatgatgttcatcatcaggaatcgcgttgggatctttcgcgcccgggtcaaaggcccacagcagtttaccggtattcacatcaaagccgcggataacgcccgacggctcgcgggtggagaagttatcggtcacggcgccggcaatgacgatagttttgtcggtaataatcggcggtgatgttggttcatacatacccggcgtagtgacaggcatgttggtttgcagattgagaatgcctttattagcaaaggactcacacagcttaccggtttcggcattgatggcgaacaggcgaccatcgttgaccggaagaatgatacgacgcgggcagtcggcaaccacatccgccggcgcgttatccgctttggcttcatgatatgaaacgccgcgacaggtcacgtgctggaaagaggggtcagcgttgagctgcggatcgaaatgccacttttctttaccggtggccgcgtcaagcgcgaacaggcgctggtgagcggtacacagataaagcgtgtcgcccactttaatcggcgtgacttcattggtgatttcacccggatcgttaggctgcttgagatcgcccgtacggaagacccaggcttctttcaggttcttcacgttatcggcgttgatctgcttcagcggcgagtagcgctggccttcctgattgcggccatacgccgaccagtcgccatcggctacgtcggaaatgggggccgctggcgttgcatctgcgctcagcgtaccgttgacttcctgcgggtcgttgaagccggcccaggtcaggataccgccgctaatcagcagggcgacaaccagcccggcaacggcgccagaggagggaattggcaggcggcgccagacaaacggcagaataagccagatgccgaagaagaccagaatgtcgctacgcggggtcagcgcccagaagtcgaagccaacttcccatactccccagatcatagtggcaagcagcagcgcggcgtacagccaaagcgcagaacgcttgccgcggaacagcatgacggtgacgcccagcatgaccaggcctgcgacagggtagtaccatgagccgccaagagcgaccagccaggccccgcccgctaaaagatacaggccacagaacgctgcaaaaagagccgtcagcgtcacgagtagccgtgattgttgagattttgtttctgccatagaaggacactcgtttgtttgttaattttttaactgcaattaagtataggatttaacaagtgtgatcggaatcacaaaatgggctttattaatcactgcatcgcatatttctttttactggtatactgcgtggcttgccggtcaacgtcggtgcaatcgcagcggctttgatgatttacattaagaatcaaatggttagttttatgaaacatactgtagaagtgatgatcccggaaactgagatcaaagcccgtatcgctgagctcggtcgtcaaattaatgaacattacaaagatagcggcagcgaaatggtgctggtggggctattacgcggttcatttatgtttatggccgacctgtgccgtgaggttcaggtaccccatgaagtagatttcatgaccgcctcgagctacggcagcggcatgtccaccacccgtgacgtcaaaatcctcaaagacctggatgaagatatccgcggtaaagatgtgctgatcgtggaagacatcatcgactctggcaatacgctgtcaaaagtgcgtgaaatcctcagcctgcgtgaaccaaaatcgctggcgatttgtacgctgctcgataagccaagccgccgcgaagtgaaggtgccggttgagtttgtcggttttgcgatcccggacgagttcgtggtggggtacggtatcgactatgctcagcgctatcgccacctgccgtatatcggcaaagtgacgctgctggacgagtaacgcggagtgtctatcccggcttatccgggatagttaagaggggcgcgtgaattacctgtgattgacgtgcttgcttttaaggttggaaatgccctggcgatagcgctgctccagcgtttcgcggctgacggcggtcacgtccagatcgcgtaacatgccatcgtgaatgccgtaggcccagccgtgaatcgtcaccttctgtccacgcttccacgccgactgcataatcgttgaatggccaaggttgtaaacctgctccatcacattcaattcacacagcgtatcaaggcggcgctcttcgggcatttcccccagcagcgagctgtgcttaaaccagatatcgcgaatatgcagcagccagttgtcgataaggccaagctcggtattttcaatcgccgcctgcacgccgccgcagccgtagtggccgcagatgatgatgtgttcaacctccagtacgtcgaccgcgtactgcacgacggaaagacagttcagatcggtatgaatcaccaggttggcgacgttacggtgtacaaacagctcgccaggttccaggccggtcaaacgttcagcggggacgcggctatcggaacatccaatccacagaaagcgcggcttctgcgcctgtgccagtttctcaaagaaaccggagtcttcctccaccagcatttttgaccatagtgcattgttgctgatgagtgtatctatatcgttcatggatgtttacgggcctgtaaccaagtaagtgcgttgcgctaatataggttaacctcacattttttaaaacaacccatcgcgtgtcacgacacgagaagagacatttaatgaccattgctctggaattaaaacagcttaaaaaaacctaccccggcggggttcaggcgctgcgcggaatcgatctgcaggttgaggcgggcgatttttacgcgctcctggggccaaacggcgcgggaaaatccaccactatcggcattatcagttcgctggtgaataaaacctccggcgaggtcaacgtgtttggctatgacctgcaaaaggatgtggtgaacgccaagcgccagctcggcctggtgccgcaggagttcaactttaacccgtttgaaaccgtgcagcagattgtgattcaccaggcgggctactacggcgtcgagcgcaaagaagcgatcgcccgtagcgaaaagtaccttaaacagctcgatctttgggaaaaacgcaacgaacgcgcgcggatgctctccggcggcatgaagcgccgcctgatgattgcccgcgcgttgatgcacgagccgaagctgctgattcttgatgaacccacggcgggagtggatatcgagctgcgtcgttcgatgtggggcttcctgaaagatctcaacgataaaggcacgacgattatcctcactacccactatctggaagaggccgagatgctgtgtcgcaatattggcattattcagaacggtgagctggtggaaaacacctcgatgaaggcgctgctttccaaactgaaatcggaaacctttattctcgatctggcgcctaagagcccattaccggtactggaaggctatcagtatcgtctggttgatacgtcgacgctggaggttgaggtgctgcgtgagcaggggattaacagcgtatttactcagttaagcgcgcagggcgtacaggtattaagtatgcgtaacaaagctaaccgtctggaagagctgtttgtcacgctggtccatgaccggaaaggagaatcagcatgatgcagctttattgggtcgcgctgaaaagcatctggaccaaagagatccaccgctttatgcgtatctggatccagacgctggtgccgccggtcataactatgaccctctactttgttattttcggcaatctgatcggctcgcgcatcggtgaaatgcacggtttcacctatatgcagtttatcgtgccgggcctgattatgatggcggtgatcaccaacgcctacgccaacgtggcgtcctcgttcttcagcgcgaaatttcagcgcaatattgaagaactgctggtcgcgccggttcccacccacgtggttatcgccggctatgtgggcggcggcgttgcccgcggtctgtgcgtcgggattctggtgacggcgatttcgctgtttttcgtaccgttccaggttcactcatggatattcgtcgccctgaccctggtgctgaccgccgtgctattttcgctggccggtctgctgaatgcggtgtttgccaaaacctttgacgatatcagccttattccgaccttcgtgctgacgccgctgacctatctcggcggggttttttattcgctgaccctgctgccgccgttctggcaagggctgtcgcatctgaacccgatcgtctacatgatcagcggtttccgctacggtttcctcggcattaacgatgttccgctcgccaccaccttcggcgtgctggtggtgtttatcgtcgcgttttatctcttgtgctggtatctgatccagcgcggacgcgggcttcgcagctaatttagccaaccacggcgcttcgctgccccgttcagcgaagcgccggcaaacaattttgattgtcatcaccgatattcatctcttcccttgctacattgtttgcctgctaaggaggtgggcgatgttaggttgggtgattacctgtcatgacgaactggcgcaggagatgctggatcgtctggagaaaaagtttgggccgctgacgcagtgtcgggcggtcaactactggcgtaatctcagcagcaatatgctgagccgcatgatgtgcgatgcgctgcacgagacggacggcggagacggggtcatttttctgaccgataaaaccggcgcggcgccttatcgcgtggcggcgctgctgagccataagcacacccactgtgaagtgatttccgggatcgactattcattactggaatgtatgtatttgctgcgtcagagtctgagcagcgaagccttccgacacgccattgtcagcgccggaggcccggcggtgagcagcctctggcatcagcagcaaaaaaatccgccttttcgactactgcatgagccgtacgggaattaagcattggtattgatgaggcttttgttacaatgacggcagttcttgtctaccggctcgatgcgcatgtttgcccgaattcttgctttactcctcctgttcacggcgctaagcgcctccgccagcctgttaagccagcagggtgtgccggcacgttatatgcaaacgaccgaagatgcggatatctgggcgcaggttggcaatcaggtggtgagcgtcggtaacgtgcgggcagggcaaattctggcggtagtaccgacggcggcggattactatgagtttaattttggctttgcgaccggctttatcgataaaggccacctggggccggtacagggtaagcagcgggtggaggatagcctgggcgatctgcataagcctctgagcaaccaaaacctcattacctggaaagatacgccaatctatgatgcccccgccgtgggcagcgcgccatttggcaccctggcgaataatctgcgttatccgattatcagcaaactcaaagatcggcttaatcaaacctggtttcagattcgtatcggcaaccgcctggcgtgggtgagcagtctggatgcgcaagaagataacggcatccctgtactgacttatcaccatatcctgcgtgatgaagaaaatacccgctttcgccatacctcaacgacgacctccgtgcgcgccttcagcaatcagatgacctggctacgcgaccagggctataccacgctcagcatgtatcaactggaaggctatctgcgtaataaagtgaatcttccggcgcgtgcggtggcgatcacctttgacgatgggctgaagtcggtcaaccgctatgcctacccgatcctcaagcagtatggctttcacgccacggcgtttattatctcgtcgcgcatcaagcgccatccgcagaaatgggcgccgaaatcgctgcagtttatgagtatttccgagctaaaacagatccaggacgtctttgacgtgcagtcgcatacccacttcctgcatcgggttgatgctgaacgtcatccgatcctcctcagccgcagctatcacaatattctgtttgattttgcgcattcgcggcgggcgctggcgcagtttaatccccacgtactgtatctctcttacccgtttggcggctataacgctaaggcgatccaggccgccaacgacgccggttttcatctggcggtgaccacggtgagggggaaggtaaagccgggcgataatccgttcttgttgaaaaggctgtatatattaagaacggattcgctggagacgatgtcgcggctgataagcaaccagccgcaggggtagatcagaaataatcgatggtaaacgtgcctatcgctttaaattttcccggctttagctcaccggatgtgcgggaaagccaggcatcaaagctatagtcatatgatgacgaattgctgacgcttgttgacggcgaccatatttctaaaccgggctgcaggttgaaaccatcggcggtagtgaagttcgacgctaaccctactcctacgccagttgccgcatcgctgccggtgagcgtattggtcattagcgtcacgccgccggtcacgctcaattctgatttaggtgtggcaagcttcatacgtacccagacggtgttattgcatccgcttaaccttaacgtaaacggtgttctcggccagtagccttcccggaaagatgagaacatgacgtcgccgaagttcacgttattggtgccgttattgaccatggcggaagaacacgttgcggccatgaccagtatgctaaagctgctgggattgacgttaatcgtccacgggttattgtcatctgaatctgccgaaccgacgcggatttgacccaatgttcttgaatctttagggtaaattctcatgtcgtggttgaggtttccttgaaaagggacgtcctgatacaaggtcacagagtactttaattgctggttattccagtacgactgattgccgccgctgacccaaacccagtccttgctgctgttaacctctggcaaatatccgccgccgccggcctgggtgtatattcttaccgcataataaataccctctatatttgtagggaaaagtgctctgccgtctacggtggtcggcgtggcgcttgggttggtttttgcataaaaatcaaatccatcgtttcccgcatcgcattcggtccggagagcgtaactggactgaatgtcgaaggtaagcagctcgggtttcttgcttccctggtcacctaatgctgtcttgaatgttattggataggtggttacaccgttgttcagcgttaacgagccgcttctgccatcgtcaagatggcactccttggcgctggcgccaaagctcagagccagcagcgcgaatgggtataccatcaatttgatcatctcatcctccctgatcactggtaaatagcgtctaccaggacatgactgttaactttccctggggtaacggtgcccgtattttgatagcgggcataaaaatcgtagctggccagatagttatccgcttttgaaacatcaataaccacggcggagctaccgtcgctattcacaacgttacggttatcgtgggtagaaaaaatgacaatcccgacgttctccgccccgcctgcggcggctggcgcttcattgataaatacctgctggctttccacgggccagatcccattttgtggcttaaagccaaaggtgagagtattgaccgtcgtggcatcgcctgagcagctttcaacgttcacgctaaatagcgtcccgctggcagggtcgccgggctgcaaacgcgaagtgccgtcatcgttataaaaccaacggcgggaaaccgtaggtagatgaacggttccattgccagagatggaaatctggcaggtattttccacaatattggctgtcagggtgacgtccagcccttctttattttcattcgcggcatccgcaaaataaggagccatgcacagcccgcctgccgctcccacaaccagcaacgccttcccaactgggccgattagacggatacagaatgacatagcggtgctgctccttttaacttactgataggtgataacaaacgtgacgggagagctgacgctacccgctgtgacgttggctatttttctatctttagcgataacaatgcgcgaagcaaaactgacgctgagcgaacgaccgctgatgctgagcgtttgtgagggcttgttattacagctaagcaacgttcccgttccggactccccttgccacacttcaaaagccgttgagttgcctgcggcaaaagagtcgccgttcgaacttgggcccgagcagccgccaccgctgccgggaatgacttgatatttggcggatttcaccccagaacagtcgctaaaggctaccttgaacggttcgctgcggctttgcttaaccagatcggatttaaatacatcgccgaaattcagcgtactcatgggctgaccgctggcgttctgaatctgcgccgtgcaggtaccggcttgaattgtcgaggtaaaagtggcggaaatgctgctggttccggttatctcggcaatagagggcgcagaaaaaagcaacgtgccgacaacaccgcccagaaaagagatttttttcatcaagaggttccttttctgatgattattcgtaggtgaagttgaaagtggccaaagcgctaaaggcacccgtcgtgccttgtcccgtctgcgtttcaaccagcgtcgcgaccagaggaacttctttgttgttaatttcctggctggtccataccagtcgacccgtgtccgagcccgcattaatcacgaaaggggcatcggtggcggaagctctggcgatagtgatcccaagggctcccgcagcatctgccgttgcgttaccattcagaatcaccgtctctttttccgccgatttcgtcccgctgatggtggttttaagcgactgcaggctgctcgggcattccgtgattttcagcttaaaggttgcctgcgccgcgctgtcgccgctgataattttatccaggctcactatgccattcgcgccgacaggaatggtgttgtttttgccatcgccgctgccgccttcaatggccatatcgcaggtcgtttcgcgcaggttagcggtaaaggtgacatccagcgatgttgcctgacccggtaacgcggtagcgagtaaaatgccgctacagcccagcaggcagcgttttctaaaactgattatcttcattctgttccctgtaaaaaagtgccgttacatctggcagcgttgatgactcagtagacgggtaagccccacttttctatcggcaccgctatcagcgagctgataatgaacggtgcagcgtccttcgcggccgcttccccagataacctgtagtgttccgctttccgtgacgccgcgaacataggccataccggcctgtccgaccgtgccgatagattcgccccgttcgttttgcacatccgcgccgagcgggataaaccccttgtcggagcgctgaagctccagcaggagtgagcgcccttcgttggtttcgaaatcaacccgcacaacggagccactgcgggggaccacgaccgtactggtattcttcacttcaacatcttcttccattgtgtcgatgttgagaccgacgctattttcccgataggcggataagtaaggttgaatggcatagccaaagcgattaatacgcccgtcgccattcgttaaacgagcgccttccgccccggaggcgtgcaccagcgccagggtatcggtatcgccaatactgcccggggccagagtcaagccgccggaatgcagcagcatgccgccgctgtagctcatggagtactggcggctgtcatcatcggaagcagaagccgacaggcttaagggcccccacgggctgctgtagctgccgtaaccgccaacctggttgattgacgagccatctgaccggctggcgctggtgttaaggctgtagctgaagcgatagtcgtcggtattgccgttggcgctggtggagatgttattgttcgacttcaggtcgctgttgacgctggtattgatggttgaaaaaccgagcggccgtttgttgtgtcccagcaggttttccagcggaatactcagattgaggtaaacgctgtcgtccttatcgccatattcgttataggaacgctggagtgaaacgctatagctggcccatgaaaatgcgtcgttataaccgatagagtactgggaggtagaggaggttttgttccagtaatcctcccagctaccgcttacatacaggttgccgctgctggattcccaaagggatatcggctgactcacattgacctggaactgatttttcatccgctgaaaacgggagtactcctgctgcgacgcattatcatgacgtttgacgttgctatttaaggtggccgcgtcgcgtaacgacatatagttttcggtggagaaacgccaggcggcaatgttgaatgaggtatttgattccctgagtagtttgctccacgtcacgcgatagctctggcccgtcagggtctccagattatccatagcggttgttgaatgcgtgatgtcaaaagcgaacgcgccgatgggcgtattcgtcgcgatacctgctaacccggcgtagtagccgatatccatatactgaaagccagcatagccggtgaaggtgttgtttaagccgtaatatcccgtggcgtaacctaacctgggcctgtcatgtaaaccgtcatcatgcagttccccggcgccgatatcccagcgtccatatccgggcctgagcatttgagtgaccgatgagtagggtaccgagaaagtacggatgctgccgtccgcttcttcaatggagacatccaggtcgctaccatagccggtagtgctgagatcggtgatagcaaagggccccggtgggacggtggtttcataaatcttattaccgttctgcttaatcacgatcttcgcattacttttcgccacgccgcggatctccggggcgtaggttgaggcgccgccgggcagcatgcgatcgtcattgtaaaaacgtacgccgcgcaggctgaacgaatcgaagccatcaccgcgggtataagagtcgccgatcagaaactgcgagcgtaatgcggcgacatcgcgctggagataaatatcctggctggtgtaatcgctaccggagtcttcatcccagttggcgttgcccctggcccgtagatgccaggcgccgacattcacgccgtacttcaatccggcataaaccgaatcggagctgctgctgtcgctttcgttatgccaggcgttgagatcgtaagaaaccatcgcggcgttaatcccgttctgccagagtgaaggatcgacgtaaccgttagggtgtttaagggtgtaaatttgcggcattgagagcgagagctcctgggtgccgatatcataattccacgtcgattgcggatactgttgcgcaatatcgatacaggccgcggattcgagatccattcccaccgtttttacgccaatttgcgccagcagctttgcggtgaagcagggcgttgcgcgaggcgtaccgttatcattaaaggtaaaatccaccagcatcttcggctgattattcagtaaaacttgcgtcttataggtgcccggcggcaccggattccctttagaaaaacggctgacgtcaatattgctaccggtactgaataaaaactgatcgttaaattcaacttcatctgaagccgctgaaagcgcttgttccgccattactgaggacggcagtgcaatatatagcgttgtacacaataacgatcgacgaaaaaacatgttgtccctgttcttgtaaaggctgaggtccttcagcagtaacaattaattgatggtggcttgatgtttttcggtaccaccaaaatcgttaatagcgatatattcaattccccctccctgtaatgctggcgcatttttaacgggaatcgtttcatgagagagcggaggaatagtgtgagaatcgacctctattttttttcccttcacggtaatggtcgctttagccattgatatataataagggctgctattattggcgattaacgcggttccttgctgcgtccattgcagattaccggcggcaaccgccggatcgccctgcaaaccatccgggcgaaaaaacatcttaatgcgggtgcgaaacgccagctgcaatgcgttttggctatcggcatcttttgcttttggcggcacctcaaggacgttaaaccagaacagcgattcccgatcctgggccagaggttgttgggtccacgtaatacgtacggtttgccccttcgacgggtcgatgcgcgagaccggcggcgtgacgacaaacggcagcttcagctcctgaggattaacggtatcgcgaccgtcatcaagccacgactgtaccagcagcgggttattaccgcgattttccattttaacggtgacgtctttggacgactggggatagataatacgggtgccggaaataacgatatccgcacgggcattaagcgtactgaacgccgcgctggcgcataccagcgatgtcagcgtaagttgggtaaaacgatccataaccatcagctccctgcaatgcgcctgctttcagccgcagacgcacaatccattacgttacgattactcgtaagacatagtaaacgtcgcgttgctcgtcactttacccgcggtgatatcgttggtgcctttcacccaatcggcgcctggaacgtaggcaacgcgataagccagtacgccttcgccgcctttcagggtggcgacctgcgtgttgttattcggcaggccaacctgaatgcgactggtgtcggtggtgctgttgttaaacagcgccaggctcacgttatcggcatgaccggtgacgctcggatcggttttcagcgtgccgttagagagttcggcaaactgctgagaggtaaaggtcgcggatgctttggtcagcgtgtccgggcagctgctcaggtgcagttcgaactcttttgagccaacgcctgcatcaacgctggtaccttcaacttctgatttttttaccaccggcatgctaatggtgacgttgtttgcattaatgccgttattagtggtgatggtgcaagtggtatcagaaactgcgccatcaaatgtgataagaccaacgtcgttaccgattgtagttaccgtatcttcagcaaatgcggaagcggagcccaaagccagaataattgatgcggcagcaatggttaacttattcatagataaacatccatataaaattaaactttcccataacgcgtgggagcagcctaaataatatttaggtgccaatgattctattcttttagatgagggctaatacttaatatttttacaaaataatgtaagtaatgacggattgatttttgctttctatgtgtgataagggggtaagtctatttttaaataatctaatgatgtgattgagaaaggtagtgggggggtaatattgatcacaatgatcatattatatcgaagaataatataaatcaaaaaaataatagctccggatagagtttcggagctattgataatatcaggcaacctgcaccggaatcgctttggcctggcgcttcatttcgttttcgccttcgaaataggccactttcggctgccaggtgcgggcttcttcgtcaggcatggtgacgaagctggcgataatcagaatatcgccgacgctcgcacagtgtgccgccgcgccgttcacggagataattcgcgaaccgcgctccgcggcgatggcgtaggtggagaaacgattaccgttggtcacgttccagatatgaattgcctcgttttcaaggatgccggacgcatccaggaaatcctgatcaatagcgcaggagccttcatagtgcaggtcggcctgcgtgacttttacgcggtggagtttgccctgcagcatattacgaatcataacgtctacctttaaagcttaacgataacaaagcggacgtgacgcccgccttgaggaaattccaggcagtattgcccgatttttaacccgtgtctaccgaacgagcgccactatctggttgtcgatcaaacgcgcttcgccgagccatgccgccatcaggatcaccgcgcgctggctgttttccgtcaggtcgagcagcgtgtcggcatcgcggatctggatatcatcggcgcggaagcctttttcgttcagctcctgcgcggcaatcgcgataatctcgtcaagattgcgctcgccggccgccagcttctccgccgcgccattcatcaccttatacagccccggcgcaactttgcgctgatctgcgctgagatagccgttgcgtgaactgagcgccagcccatctttcgcgcgcataatcggtacgccgataatctcgatgtcgtagcccatatcggccaccattttgcggatcagcgccagctgctggaagtctttttcgccgaagcaggcgacgtccggctggatcaggttgaacagcttgctgacgatagtggaaacgccgcggaagtggcccggacgactggcgccctcgagcatcgtcgacagccccggaacatccacgtaagtctgattttcgaggccgtgcggatagatttccgccgcggcaggggcaaagacaaaatcgaccttacgcttgttcagcttttcgcaatcgtcctgcagggtacgcggatagcgcgccagatcctcggcgcggtcgaactgcatagggttgacgaagatactggccaccaccacatccgcgctggctttggcggtatcaaccagcttcatatgaccatcgtgcaggttgcccatggtgggaaccagcgcaatgcgcttgccttcctggcgtaaacgacggatatgctggcgcagcagcggcagggtttcaataatcagcacaacaacactccttaatggaaactgtgttcttcgcccggataggcgccggactccacttcggcaacatattgccgtaccgcggcgcgcatgtcgcccgctgtgctcaggaaatttttggcaaatttgggaatatggccgccggtaatgccgaatgcgtcatgcatgacgaggatttgcccgtcggtgacgttgcccgcgccgatgccgatcaccgggatggttaacgcctcggtgacgcgtttcgccagctcgaccggtacgcactccagcaccagcagctgtgcgcccgccgcttccagcgccagcgcgtcatccagcagaacttgcccggcatcgccgcggccctgaattttatagccgccgaagacgttcaccgactggggcgtcagaccgaggtgcccgcacaccggcaccgcgcgctcggcaagcattttcacggtgtccgccagccatgcgccgccctcgattttgaccatattggctcccgcgcgcatcacgatggcggcgttctcgaaggtctgttccggcgtggcgtaagccataaacggcagatcggcgagcagcagacagttgggcgctccgcggcgcaccgcgcgcgtgtgataggcaatgtcttctacggtcaccggcagggtggagtcgtggccctgcaccgtcatgcccagcgaatcgccgaccagcatcacgttgataccctcatcggcaaacagctttgcaaagctgtagtcgtaggcggtgatagtggcgaagcgtttcttctcctgtttgcatttctgcagcagggcgatagtggtcggtttcataacgtttcctgatgatgaaagtcattttaaccggcattctagcagccgcattcaggggggcaatggttttaggcaaccgattaccacgatcgccgtaattgctaaaaaatgaaggggtattaccaggcggcgggtttttccgcgccgagattggccagcacgtcgcgcagcgccgggccgtcggggaaacgcagctcaggggcgatttcaaacagcggccacagcataaaaccgcggttttgcatatcgtagtgcggtacggtcaggcgcggggtgttaatcacctcattgccaaacagcatgatgtcgaggtccagcgtgcgcggtccccagcgttcagctttacgcgtgcggccctgctgcagttcgatgcgctgggtgtgattgagcagcgcgtctgcgtccagggtcgtttccagcgccacggcggcgttgagatagtcaggctgatcctgtggccccagcggcggcgtacggtagaaagaggaaacgcttatcacccggctgccaggaatctccgacagcgcgttgacggcagcgttaacctgctccagcggcgaggccagattgctgccgatagcgatataagcgagcgtcatgcgctaccttcgcgacgcggcgcgcgtttgcgcggacggcggtggcggcgacgtggagccggatcgtcgcctaaatcatccagcatatctttctgagccggcggcgcggcgacctggaactcgccccaccatttggtcaggcgctgtagttcgctattgttctctgcgccggcgcgcagctccagcagatcgtaggcggcgcggaatttgggatgctccatcagcttccacgcgcgtttgccctgacggcgggacatccgtagctgaagctgccagatatcgcgcaccagggtggtgatgcgtttcgggatcgccagcgtacggcaggcctcgtccagcacgtcgttcatcgccagcgcgaaggcgtcgtagtaggccagcccgctttcctgggcgattttctgcgcggtttccagcagcgggtaccagaacattaccgcgaacaggaacgccggattaacgcgcatgtcgttgcgaatgcggttatcggtattcttcagcacctggctgatgatgcgctccatcggactatcgccgcgctcggtgaagtagcgggtaatggtcgggaacagcggctggaacagattatattcgcgcagcaggagataggtttgatagccgtcgccggcttgcagcagctttaacacttcttcaaacaggcgtgccgggggcacatcgtgcagcagcgtcgccaggcgcgggatcggttcggcggtctcttcgctgatgctcatactgagcttcgccgcaaaacgcaccgcgcgcagcatgcgcaccggatcttcgcgatagcgggtttccggatcgccgatcaggcggatgacgccatcctgcagatctttcatgccgccgacgtagtcgcggacggtgaaatccgccacgctgtaatagaggctgttgatggtaaagtcgcgacgctgggcgtcttcttcaatcgaaccgaagatattgtcgcgcagcagcatgccgttctggccgcgctgggaggtgacgcgatcggtggtgtggccttcgtgatggccgcggaaggtcgcgacttcgataatttccggcccgaacatcacgtgcgccaggcggaagcgacggccgaccaggcggcagttgcggaacagcttacgcacctgctccggcgtggcgttggtggtgacgtcaaaatctttgggttttttgcccagcagcagatcgcgtacgccgccgccgaccagccacgattcgtagcccgccttattgagtctgtacatgaccttgagggcattttcactgatatctttgcgggaaattgcatgctgctcgcgcgggataaccgtcatatgtagttgttcgacggcggcttctgcctcgcgctcttcacggcttagcaccttacggcaaaaattagcgactcgggtaaaaatggtacacctcgtagtgtcagacggacttcaggacaaaaaaatagcggctaatcatagctcagcagaacgcatttgagaatgctggatttgctccggccgccagttcgctaccgcgtacttgagtaaatcctcaatgctcagcgtctgccattcctgaatgacatcctgattaagaaacgttagcgcccgcacaatttccgggcgcggatcgcctgtagataacgccggagcgtggttttgcttcgacagtttattgccctgcgcgttgaggaccagcggcaaatggatatagtccggcgcctgccagccaaaatgctgatagagcgaaatttgccgcaccgtcggctcgataagatcggcgccgcggacgatttcgctgacgccctgaaaatgatcgtccaccaccaccgccagattataggcgaacagcccatcgcgacggtggataataaaatcttcacgcgccagaggttcgtcggcgacgatcgtaccgcgtagctggtcataaaattcaaggaccggacgcgtttgccgcaggcgcagagcggcgttttccgcgccgaggcgtaaatcccggcagtggccgtcgtaaaggccgccgatagcgtggatacgcgcgcgggtgcaggtgcagtagtagcagaggccctgctcgcgtagccaggccaggcgctcacgataggcttcgtggcgttttgactgccagagtacctctccgtcccagtgcaggccgaagtgctctaactgacgaagaatagtctcggcggcgccggggacttcacgcggcggatcgatatcttcaatgcgcacgcgccagataccgttctgcgcccgagcctggagatagctgccaagcgcggcaatcaatgagccgaagtggagttcgccggaaggtgagggggcaaagcgcccgatgtagtgggaatctgtcatcgtatgactaaagcatcagagcgggagaaagctcccgccagagatgcgtcagcgaagtgattagcctgccatctgtttttcgcgaatttccgccagcgttttgcaatcaatgcacaggtcggcggtcggacgcgcttccagacgacggataccaatctcaacgccacaggattcacagaagccgaaatcttcgtcttcgacttttttcagcgttttctcgatctttttgatcagtttacgttcgcggtcgcggttacgcagctccaggctgaactcttcttcctgagcggcacggtctaccggatccgggaagttagcagcttcatcctgcatatgcgttacggtgcgatccacttcatccctaagttgattacgccacgcttcaagaatgcgcttgaagtgcgccagctgggcttcgttcatatactcttcgcccggcttcacttggtacggctccaccccagcgatggagagaatactcagggacgatgttttacggttttgcccttcttgcatgttgcttctccttaacacgcactatcgatccccgtgttgggggaaaaatcaggccgctataaatagcagatgcttttccggatagcaattatctaaacgttacacttgacaaccctgtgaggaaaagcgtatttgcgctcgcgacccgaatactatttagccgtttatttaccgggggttaacaccacggtaatcggcttattcagagtcatcatctcggtagaaagttccgccttgtaggcgagaatttccacccccttgttttgcgcctcaatcaatagctgtgcgtatctggcatcaatatgatgcgcgggtgagaaacggtctatcgccgagtgcagcacggcgaacaaaatcaccgcccgatcgcccgctgccgccacgctcatcagctcccgcaggtgcttctgaccgcgtgcggtaaccgcatcggggaagtaaccgtattccttttccgccaacgtaaccgatttcacttcaatatagcagttttgttggtcatctgcttgtaacagaatatcaatgcggctgctttcatcaccatacttcacttcgcttttcagcgcgttatagcccaaaagctcgggaatatttcctgccagaatcgcctcttttgccaacgtgttagcacgtagagtattaacacaaattgtcgcgccctctacggtttcagttaattcccacgtgtgggcatatttgcgcttaggattatctgaggtggaataccagacggtatcgcccggcgcggcgcagccggtcatggcgccggtgttggggcagtgcagggtcagctcgcgaccgtcgggggtgaccacgtcggcgagaaaccgtttgtaacgtttaaccagggtggcggactgcaggggaggagtgaacagcatcagctttccttgtcgaagggataacgttccagcgcctgatagcgggtgcgcccgcggctaaagctggattcgtagagcacaaattcgttgaccgcaaacgcccagctaaatccgggcggcggaatcggcaccgcgtggcgcgcgtcgcgcagcagggttatatgcggatgaaacggctgcgggctctgatagcagccgctgcgggcggcctgggcgcgcagcatattcgctaattgcagcaccccgcgcggcggctgacgggtgcccagccacaccacccgcgaacgcagccactgcccggcatcgtcaagcgtcagggtaaagcccggctggcggatccgtccggccatcgctgacagcgcccgctgcttgtccgcgctcacctcgccaagaaacgccagcgtcagatggaggttagccgccgccaccggtcgccccgcatcgccgggaaagctggcggcgcgccagtgcacgatctgctgctgaacgtccccgggtagttcaatggcgaaaaacagccttttcggcttggacatgatagagactcggtaatgaattaccgggatgctacaatgcttgcccgcaaatgttaacctccggagcgtttcgtgtcctcattgccggttgccgccgtcctccctgaacttctttctgccctgcggcatgcgccgcaggttctgcttaatgcgccaaccggcgccgggaaatccacctggctgccgctgcaaatcctcgccgaaggtaacatcaacggacgcataatcctgctggagccgcggcggctggccgcgcgtaacgtggcgcagcggctggcggaactgctgggagagaagcccggcgagaccgtgggctatcgcatgcgcgcggagacctgcgtcgggccgaacacgcgcctcgaagtggtgacggagggcattttaacgcggatgatccagcgcgatccggagctgagcggcgtggggctggcgatcctcgatgaattccacgaacgcagcctgcaggcggatctggcgctggcgctgctgctcgacgttcagcaggggctgcgcgacgatctcaaactgctgattatgtcggcgacgctggacaatgaacgcctgcagcggctgctgccggaggcgccggttatcgtctctgaagggcgcgcgtttccggttgagcggcgttttctgccgctgccggcccatcagcgctttgacgaggcggtggcggtggccgccgcggagctgctgcgcagcgaaaatggctcaatgctgctttttctgcccggggtgggagagattcagcgcgttcaggagcggctggcggagcgggtggcgagcgatgtgatcctttgccccctgtacggcgcgctgccgctgagcgagcagcgtaaggcgatactgcccgcgcccgccgggatgcgcaaagtggtgctggcgaccaatatcgccgagaccagtctgaccatcgaggggattcggctggtggtggatagcgcccaggagcgcgtcgcccgctttgacgcccgcaccgggctcactcgcctggtgacgcagcgcatcagccaggcctcaatgacccagcgcgccggacgcgccgggcgtctggaaccggggatctgcctgcatctgctggctaaagagcaggccgagcgcgcggcggcgcagggcgacccggaaattctgcaaagcgatctgtcgtcgctgctgctggagctgctgcagtggggatgccaggacccggcccagctcagctggctggatctgccgcctgcgaccaacctggcggcggcccggcgtctgctcaccgacctttctgcgctggaaggcgagcggctgtcggcgcacgggcgcaaaatggcggcgttgggcaacgatccgcgcctggcggcgatgctgaccgcggcggaggatgccgatggcgccgccacggcggctaaactggcggcgatccttgaagagccgccgcgcggcggcaatagcgatcttagcgcggcgtttgcccgtcagcagggtaactggcagcagcgggcgcagcagctgatgaaaaggctggcggttcgcggcggtcagcccgatgccgacagcatcgcggcgctgctggcctccgcttttgccgaccgtatcgcccatcgtcgcggccaggaggggcgctaccagctggctaacgggatgggggcgatgctcgacgccgacgatgcgctgggccgccacgaatggctgattgcgccgctgctgctgcagggaagcgcatcgccggacgcgcggatcctgctggcgctgccggtcgatattcacgcgttgattgagcagtgtccggccctggcccggcgttccgatatcgtcgagtgggatgaggcgttaggaacgctgaaggcctggcggcgcacctgtatcggacgcctggtgattaagacccagccgctggcgaagccgtcggaagaggagctgcaccaggcgatgctcaacgggatccgcgagaagggactgagcgtgctaacctggacgccggaggcggagcagctgcgtctgcggctacactgcgcggcgcggtggctgccggaggaggcgtggccggccgttgacgaggcgtcgctgctggcctcgcttgaacagtggctgctgccgcagatggcgggcgtccattcgctgcgcgccctgaaggcgctggacgtgcgtcaggcgctgcaaaactggctgccgtggccgctgcgccagaagctggacagcgagctgcccacgcactatacggtgccgaccggtagccgcatcgcgattcgttatcacgatgaaaacccgccggcgctggcggtgcggatgcaggagatgtttggcgaagcgaccactccgactatcgcccaggggcgcgtgccgctggtgctggagctgctttcgccggcgcagcgcccgctgcagatcacccgcgatttaggcgccttctggcaggggagctaccgcgaggtgcaaaaagagatgaaagggcgctatcccaagcacgtctggcccgacgatccggccaataccgccccgacccggcgcaccaaaaagtattcgtagccggagagttcccgggttgcggcgtaaacgccttatcggggctaccggaccagtaccgccagtagccctgctaagcgcagcgcgagcaggggatgttttatacctggctccacaaaaagatgccgccgcccgccagcgccagccaggggccgaaggccagaggttgttcgagcgaacgacgggttaccagacgctgcagcagcgtccagaccagaccgctggcggaagccagcagcagcgtctgcggcagcggctgccagccgagccacgcgccgagcgctgccagcagcttgaaatcgccgtagcccagcgcctctttaccggtcagcagacggaacacccagtacaccgaccacagcgacaaatacccgaccatcgcgccaatgaccgcctccgccagcggcgcgaaggtatcggaaagattgaacagcagcccggcccacagcagcggcagcgtcagcctgtcaggcagcagctgcgtttgcgcgtcgatggcggcgaggatcagcagtacggacacgaaaattagcccgcccagcagcggcatgcccggagccatcaggtaccccgcgagtacaaacagcgcgccggtcgtcagctccatcaggggatagcgacgcgagatcggctgcccgcagcagcgcgcgcgccccctgagccataaaaagctcagcagcgggatattgtcccgccaggcgataggctgacggcactgcgggcagaacgacgcggggaggcagagattcaccccctctgcgcgttccatcatcagcggtaaacgatggataacgacgttaaaaaagctgccgaacgccagtccggacaggaataaaaagccgccccagattgacgggtattgcgcggcgaactccggtaacagcgcgatattttccatctctattttttctccccggagcgccactgcccctgccactgccacggcgtgcgcccctgctcatctttgcggccgttttgcgcgagcagcagcgtcagcagcgccggagtcgtctggcgggtctgcagcgtaccgttaaacgtatagcgcccgttgggcgtcagaacgccctgtcctgcgaggctaagctgacgggagtcctgggtcagggcgacagtcagcgtgcccgccggggtacagcttaatttgccgttgacctgggccagttcgagcgacccggcgggggagctgagcgccgcattccgccactgcacggtgctggcggtcatctgtcggcaaccgccggcgttaaagcgggcctcgggcagcgtcagcacaacctgaccgcgagcctccagcggtatgccggatgctaaccgctggccgagcgtccgggccggcgccgcgagtcgcccctcgcgcaccacaacgtcgttcagaccgtgcagccaggcccggccgcgcaggccggaggggtcgttaaacgcgatatgccagccgggaagccacgacgaaaagccaaactcccagcgtaaatgggcgatgtcaaaaccgcgccagctggcctgacgggcttctccttgccacagggtgcccgtggtttcgccgagccgcgcgccgtccggtagagccagagtgagcagccgcgccggcgcgctaaacagcagccagaagagatagaccgccgccagcagcagggcgatagtgagtttatttttcatcgctgcgctccagcaccagcgtattaatcgtcacccaaccgggctgctgcgccacggcggtcaccgccagggtggcggtagtcatccccgcctgccccagcgcgcccagccatgccatcagcgtctggaaatcggcgggctgcacggtaaggctcaggcgggagccctgcggctgcaggcgaacgatagtgataccgtggcggccggcttcgcgcataatcaccgttgagggttcttccggagcggcagaaggtttccgctggttaagctgctggagaagcggggtctgctggcgcatccaccgcaggctggactgctccctggccagcgtttgccgccactgcgcctcgcgattttgccagggctgccagagggcgtaataaatcaggccaataagcagcatgacgcccatccccagcagcagatgccgttcgcggcgcgtacgctgttgccataaggcgagcaggttatccatcgttgccctccaacgtcagacgcccttcaataccgtcggcgcgcggcttcatctcgccggtctgcacgcgaaaccccgcccgcgcccgctggctgaactgcgccagggcctgcgatgaaacggcggatatctccagctgcagcgcgttgcgcgcggcgtcaaagctcagggcgcgcagacgaatgcccggcgtttcggcgatgatttgctgcagggcgccgagccgtgagatgagcgccggccgggcgctcacgctttccagacggcgcagatgctgctgcatttgcaggcgtggattgacgagatttttttccgctttgaaccactggcggtaaaaatcacggctggcctgcacggcggcgtcggcctgacgcgccagggcgagatggtcgtggaggcgatttccgctccacagcagcagtagcgccagggttgcgacaatcgtcggccgccagcgtcggggcgtcggcggccggcgtttcgcggcaaaattgccctggcgtaagcagattttgcgcgcctgcgggttgcttgccgccagcgccagcaaatcctgcaccgggcgaggctgccacggcgcggcgatatccggcggcggcgagtagcaggcgatgggcgcgaggtcaggccagtgaaccagcagttcgccgagccatggggtttccaccgccataccgctgcacgtctcgcagcgaaacagccactgttcgccgcagcgtacggcgctccagccggtcgggttctgcggcagggcaagggcatccggcgtcagggccagcacgttgagtccgagcccctcgcaccaggcctgccatgcgcgcatcttctctcgcccgaccaccgccacggcacagtcgcttttatcccggtggatcagggcaaaatggctctcttcgatctccgttgccagctgttcttcgagtaaaaacgccagcgcctgctgcgcatttcggcgcgcgccggcgggcagggtaacgcgatgaaacgcgcagtcgctggcgggcaccagcacccaggccggatgacgctgcgccagcaggctgagcgtcgggtcgccagcgtcaggatgccactcgccagtctgcgccgcgtcgcccggcgcggccagccgccatatcgccgtcgcggcatcgggattgaggcgaataatcagcacggcggcggaaaaagtatggtggttattcatcggctacccaatagattccgtagcgccgctggacgacgctgaaggttcgcccctgcttttgcaggagactgcgttgctgatagcgggcgctgcccatcaccacgctgaaggtggcgataaagcgctcgctgtgcaccgccagccacggacgcgcggcggcggtatcggttttttgtaatagcggctgcgacaggaaggcggcgacgctgctccagccggtggtcgcgcgggcctgcagcagctgccgggcttcgacgagggtgagttcagcggggaagagcgccgccagcagcgcggcctgagcgggctgcagggtattgacgtttacctgcagcgtctcgtccgccagggcgcagacgtagggcagcagacgctgatagagcgcggcgtccatcccggccagcagacgcagttcgctgacgtcctgcagcggctgattgccggtcagatagccgggggattgcgccatatagacttcgtcttccgcgccgttcagcagcgcctggcgatcgctatccacccagtcgcgcagggcggcggtcagctgtaaggcgcgcagcggctcgctgccgaggttctccagcagtcgggtaaaaacctgcgcgggataagggatttcaacgctttcgtcgccgctgagctggttaatggcgttgaggttgaagcaggcctgagcgtcggtaatcgtggcgtagatctcgccatcattgaccgcaaagcggcgcccctgctgggcccagttctgcgccagatgggtctggttcggcgagtcgagcgcgtcgcgttgcagcagcgccgccgccagggtttccgcccccagcgcgtaccatttagcctgcaggttatcgagggtagtggcggtttgctgatacatccgcgcgctgcgttcggtcatggcgctcgccagcaccatcatcagagcgaggatcagcagcaccataagcagggcgacgccgcgctggcgggtattcattggctgcctcccgacgtaagcagaaacagccggcggatctcgccggactgctccagcgtcagggtgacttccagcccctgcggcagcgtctgcgtctgctgccattcatcctgccagcggccgctggcgtaaaagcgcaggcgaaacgcctggacgccgcgctgcataacggtcaccgtgggcagactaccgggcagcgggtcctgctggtcgtagctcagacgctccagccgatccccgcgcaggcggtagccgacgttctgaatttccgagcgcggcaggatccccaaaggattgggccagccgttgcggctaaaggcgatcgcccagtcgtcgctgccgagctgaaaacgtccggcaaaaaagaggctcgcgctgtcgcggctgcggcggggaatgatttggctaaagtccgccgccatctggctgaacgtgagctgtaacgcctgcatgcgcccgcccttatcgcgggtgagcgtatcggcgcgcatcacgttttgcagcaccgtgaccgcagcgacgctgagcgcggcgaggattgccagcgccagcagcatttcgacgagggtaaatccgcgagcgcgctggatcatggcggcgtcacgtaggtgcgcagcgaagagacgggcattttatcgcttttggcgcagcggacttcaacgtccagcgcccgcagctgcggcaggtcggtctccaccccctgccagcgaatgtgccagctgacgcccgccgcctgcaccgtggtttccgaccagctcagcgcgggccagcgattttccagccgtagctgcaccagctgattatccgccagccaaccggccagggttttctcttccatacgacccagctggcgggtttgctggagcgtggcctgcatcaccgccagcccggcgagggcgaagaccgccagggcgaccatcacttcaatcagcgtcataccggcctgctttttcatggcgtctcctgcggttcgggcaggctttcgccgcgcgcattaaacgcgatacccggtccctcgccgacggtcagccggaacggcgtcatctcaccgccgggaaagatcagcacatcgggattgtcgcccggcgtccaggcctcgccctgcggaaaagtgagatgcagcgtgttcccggcgacgctgcccgaggtggcgacgcgtccggtgcgcagggggagccagcgatagccgttccagtcgtcgccggccgggggcggttcgttgctttcgcggggctgtaagaccagaaactgccagcgatcgggatgcaccgaggcgccaaaaaactggccggtttgcagccctcgctgctggacaaagcgcagctgcgcctcaaagcgtgccagcgcctgcgccgagctatcgtcgcgcgaggcggggaaggccagcatcaccatgcccgcgctgacgccgatcagcagcaaaatgagcatcatctccagcaacgtaaagccgcgctgtcgcactatttcttcccgatcgtccagttgccgatatcgtcattgctctccggtacgccgtccggcccgaggctgaaaatatccacctgtccgtgctggccggggctcagcagctggtaatcgctgccccacggatcctgcggcagacggcgaatatagccgccttcaggatagttgcgcgcgtgcggctcggccgatggcgcgctgaccagtgcctgcagcccctgctcggtggtgggatagcggctgttatccagtttgtacatgtccagcgccccctcgagcgccacaagatcgctgaccactttttgccggtcggccttttccttgttgcccatcaggttgggcaccacgaggctggcgagcacgccgaggatgacaatcaccaccatgatttccagtaaggtgaatccacgctgtcgttgcatatttttctccattagaacaattacatactcatcagggtattgagctgcagtatcggttgcaggatggcgaggacgataaacagcaccatgccggccatcgccaccaccagcagaggttcaaacaggctgagggccagctgaatttgcgcgctcagatcccggtcctggttatccgccgcgcgctccagcatgccgttgagctcgccgctctgttcgccgctggcgaccatgtagcgcatcatcggcgggaacagctgggtcatttcgagcgcgcgatgcaggctgacgccttcgcgaaccgcgtcgctggcggcttccagctggcgcttcgcccaggcgttgcttaatacttccgcgctgatgcgcatcgccagcagcagcggaacggcgctggcgttgagaatgctcagggtgcgggcgtagcgggcgctgttaacgctgcgcgcgacccggccaatcagcggcaggcgcagcagcagcctgtgccaggccagccgctttgccggctgctgcagcaggtagcgcagcagcagagcgatgagcatggcggccagcagcagccacggaccggcggcgcgcagcacatcgctcatcgccatcagcaggcgggtggaaaacggcagcgcctgcttaaggtggataaactgctcgacaaccttcggcaccaccgtcgacagcagaatgacgatcacgctgaccgccaccagggtcagcacgatggggtaaatcatcgcctgcagcagccgggcgcgcagctgctggcgctgttcggtatagtccgccagccggttcagcacgccgtcgaggtggccggaggcttctccggcggcgaccatcgcgcagtagagcgcgtcgaagcagcccgggtagccgcgcatcgcttccgccagcgaatggccttccagcactttgccgcgcacgccggcaatcagggttttcagctggtttttttcacactgctgggcgaccgcgtcgagcgctttttccagcgggatggcggcggcgaccagcgtcgcaagctggcgggtcaggagggcgagatcgcgggcgttggtgcggcggataaagcgcggttgcccgccgctgccggctgccggggtgatgtccagcgccagccagcccttttcccgcagcagctggcgagcgtggcgggcggagtccgcctgctggacgccgcgccgggttttaccgttttcatcaacggcctgatagcgaaaaagcgccatgtcaggaggcctccgcgatctgctgttcgctaacccgcagcacctcttgccagctggtgatccccgccagcgccttgtcccgtccggcgtggcgcagggtgatatagtccgcccccagctgctggatcagcgtcacctcgttttcgccgcggtggattgccatacgcacgcgatcgtccaccagcagcagttcgtgaatgccggtacgtccgcgatagccggtaaagccgcactcggcgcagcctcggggctgccagagcgccgtgccgggagcgatctccatctggcgggcggtgtcggcattggccggttcctgctggcgacagtgcgggcagagccggcgcaccagccgctgcgacatcaccgccagcagcgaggtggagagcagaaaaggctccacgcccatatcctgcaggcgcgagatggcgcccagcgcgctgttggtgtgcagcgttgagagcaccagatgaccggttagcgaagcctgaacggcgatttgcgccgtttcgccgtcgcgaatttcgcctaccagcaccacgtcagggtcctggcgcaaaatagcgcgcagcccgcgggcaaaggtcatatcgactttcgcgttaacctgggtctgaccgatgccctccagctcatattcgataggatcttcaatggtcatgatgttgcgctcgcgggcatcgaggcggctcagcgcggcgtagagggtggtgctttttcccgaaccggtcggcccggtcaccagcacgatgccgtgcgggcgggcgatcagtccatccacctgctgaagcagcgcgggcgacatgccgagggtcagcaggtcgagattgacgctgtttttatcgagcagacgcagcaccacgcgttcgccgtagctcgacggcagggtggagacgcgcacgtcgacggcgcgtccgccaatgcgcagcgccatgcgaccgtcctgaggaatgcgcttttcggcgatatcaaggctcgccatcaccttaatgcgcgagatcagcagcgcggcgaggcggcgctgggggcgcaggatttcgcgcagtacgccgtcgacgcgaaagcgaatttgcaggtggcgttcataggtttcgatatgaatatccgacgctttctctttgatagcctcggtgagcatggcgttaatcaggcggataatcggcgcgtcgtcttcgctatccagcaggtcgtcggtgtccggcagttcttcggcaagggtgtacagatccagctcgttgccgatatccgccatcatgcgccgggcctcggcggagtcgcgctgatagctcagcaccagcagcttttcgaacgcctccgcttccagtcgctcgaggctgaacggcatcccggccaccctgcgggcttccagcagcgcctgcggcgcggtggcggcgaggcagaaaacctcgcagctttcgccgttgctcaggagcatcacgttgtgcgcgcgggcgtagccgaaggggagcagcgggcgtcgtccagcggcgggggtcatagattgcctcccagattgaaggcgtcgatggcggcgctgacctggcggaacgcggcggtatcctggcgcgggtagatctccagcagatcgttactcagcatcgcgtcgttgttctctttgccgcgctgtttgctctgggcgtcgttaaacgcggtgtactgcccggatgaagcctgacggtactcgtcgcggtcgcggatcaccgtcgggcggataaacagcatcaggttgcgcttggagacctttttgctggtggagcggaacagcgcgccaatcaccgggatatcgccgagcagagggactttgtcggcggtgtcggagacgcttttatccagcagtccgccgacgaccaccgtttcgccgctgccgaccagcacggcgttattaaccgtacgggtattgaaggtcgcgccgagatccgagctggtgctggaggcggcgtccgccacgctggagacctcctgttcgatctccagcagaaccgaatcgccttcattgatctgcggcttcacttttagcttgatgccgacggttttgcgctcgacggtattgaagatgttatcgccggaggtggtttgcgagccggtcagcaccgggacctcctggccgacgttaaaggtggcttccatgttgtcgagggtgacgatactcggcgtcgcgagaatatcgttcttggtgctgctggagagggcggttaacagcatcgcccagttgccctggtagaacccggcggcaatgccgttgaaggagcttaaggcgcttgccagcgagctgctgacggtgccgtctttgttgtactggttggccccggcgatggccgtggatatcggcagaccgctgttggtgaactgggtcatcccggcatttttattggcccactggatgccgaggttcagaccgtcagcgtcctgcacttcggcgataatcgcttcgaccagcacctgcgggcggcggatatccagctgggcgatcacccgttccagatcgttcattacgtccggggcggcggtgacaatcagggcgttggtctgaccgtgcgctttgataatgatatttttatccagcgccgccaccggcttcgcggcctgcttttcgctctgcatcgtgctgctgatgccggtcagcacttccaccaggtcggaggctttggcgtatttcaggtagatcactttggtattgccctgggtcgcctgctggcggtcgagctgcttaatcatggcgatgatccgctggcgggagttcggctcgccgctgaccagcaccgcgttggtgcgttcatcggccaccacgttggcgaccattgagccgggcagcgccgatttgctggtgtctttgttgagttcggtcaccagcttgaccacatcggcggcggaggcccaggcgaggggaacagtcaccacgctgcggtctccggcgttatcgacgcgttcgacgatggttagcaggcgcttgatgaccgccgcgcggccggtcatcagcaggacgttggagggttcatagtgcaccacgctgcccgcgccggcgttatcgttaagctggcgcagcagcggcgccagatcgcgggccgcgacgttggtcaggggcactacgcgggtgacgacctcatcgccaatgcccggcgcggcatcgctcgccaccggcaccgcggcggttttcgcatccttcgaacgaacgactttcaggacgccgttattcatattaatcaccgcgaagccatagacatcgaggacgctgaggaagaattgataatattgctcttcgttgagcatatcgtagctgcgcacggtaatggtgccgcgtacgctgggatcgataatgaccgttttattcaggtttttactcaccgtattgataaattcctgaatatcggtgcccttaaagctggcggaaaactcttccgccgcggccggtttgaataacagcgcggcgaataccagcagcatcagggaaaatgggcgaatgacgttggcgatgatcaattattcatccctcagggctagataaatatcttgtttctggccgtcgcgttcaacggtaagagttatttcagttaattccggtagctgggctaatgcctggcgggactgttctttatcgcggagatccaggccgttcagggctatcgccagatcgttttctttgagacccgcctggcgaaatagcgccgggtctttgcccggattcagacgatatccgctgagcttgtcgttaaccatgaccggcgaaatattgaggtaatgaagaatattttgcggctgctcgcggagttcctgcgccaattggcgggctggcggcgcggcgctatttttgccggcggcgggcgggtcgttaaacagcgggatagcctcatttctgccgcggtaattaacaatcaggcggtcggggaaaatggcgacgattttcgcctctccgcccggcgtgctatcgccaatcccgaggctaacctgttgattccctttcatcatgatggcaatggcgcgagagggatcggtgctggcgagcaggccggtaacgcgcagtttgagcgccgatacgggcgcctggtcgaggttgccgccgtgcgcggaggcggaggttttctccgcaaggccaaacagcgtaaagcgcggcagcgccgtttccggggagggcgcggcgggcgccgtcatatcggcagggctcaaggcgttatccgtaaagtttaccgggagaattattttccaggttaattgggcgagctgctggcagataaaaaataatatgatggacgtcacaatatgaggcgcgtaattaattatttttttatttgatattgttaatctcatcacggaattatgcatttttattcctttgctcattctatttccctcagcaaaaggtaccgccctaccgatattggtggggcattttttattgtgagcgtgcttattgcgggaatctgcgtaggtcgctgcgaatcataaagagtttggctattgtggtcgtcattccctttttattttttctcctccggccgcctacgcccccacgtaatgagcgaatggatgattgaaccggagagagcaagaatatctaattatcggcgctttaaagatatgctcgttatttttttatggtgcttaagtgcgccaggaatagtttcgcgtatataacacttcatataatttaatcagcatgtatagggactatcgaatgctcagatatacccgtaatgccctggttctgggatcgctggttttacttagcggttgcgataacggatcctcttcttcttcctctggaaatcccgatactcctggtaatcaggatgtggttgtacgtttacctgacgttgccgtacccggcgaagcggccacggcgacagaaaagcaggcggtcattcacctggtggatatcgccggcatcaccagcagtagcgctgcggactacagcagtaaaaacctctacttatggaacaacgaaacttgcgacgcgctgagcgcgccggtagcggactggaatgacgtcagcaccacgccgagcggcagcgataaatatggcccgtactgggtgatcccgctcaacaaagagagcggctgtattaacgttatcgttcgcgacggcaccgataagctgatcgatagcgacctgcgggtgtcgtttggcgactttaccgatcgtacggtatcggtgatcgccggcaacagcgcggtctatgactcccgcgccgacgccttccgcgccgcttttggcgtcgcgctggccgaagcccactgggtcgataaaaatacgctgctgtggccgggcgggcaggataagcccctcgtgcgcctctactacagccacagcagtaaagtggcggccgacggcgaaggcaaatttaccgaccgctacctgaaactgacgccgactaccgtcagccagcaggtcagcatgcgcttcccgcatctttccagctatgcggcctttaagctgccggacaacgccaacgttgacgagctgctgcagggcgaaacggtcgccattgctgccgcagaggacgggatcctgatttccgctacccaggtacagacggcgggcgtgctggatgatacctatgccgaagcggcggaagccctgagctacggcgcgcagctggccgacggcggcgtcaccttccgcgtctgggcgccgaccgctcagcaagtggatgtggtggtctacagcgcggacaaaaaagtgattggcagccatccgatgacccgcgacagcgcttccggcgcgtggtcgtggcagggcggtagcgatctgaaaggcgcgttctaccgctatgcgatgacggtttatcatccgcagtcgcgcaaggttgaacagtacgaagtcaccgatccgtatgcgcatagcctgtcgaccaactcggagtacagccaggtggtcgatctcaacgacagcgccctgaagcctgacggctgggatagcctgacgatgccgcatgcccagaagacaaaagcggatttagcgaagatgacgattcatgaatcgcatattcgcgatctctccgcctgggaccagaccgttccggccgaactgcgcggtaaataccttgcgctgaccgccggcgacagcaatatggtgcagcatctgaagaagctctccgcttcaggcgtcacgcacgtcgaactgctgccggtcttcgatctggcgacggtgaacgagttcagcgacaaagtcgccgatattcagcagccgttcagccgcctgtgcgaagtgaacagcgcggtgaaaagcagcgagttcgccggatactgcgacagcgcttccaccgtggaagaggtgctgaatcagcttaagcagagcgatagccaggataatcctcaggtgcaggcgctgaatacgctggtggcgcagaccgactcctacaactggggctacgatccgttccactacacggttccggaaggatcctacgcgaccgatccggaaggcacgacgcgcatcaaagagttccgcaccatgattcaggcgatcaagcaggatctggggatgaacgtcattatggacgtggtatacaaccacaccaacgccgcgggcccgaccgaccgcacgtcggtgctggataagatcgtaccctggtactatcagcgtctgaatgaaattaccggcagcgttgaatccgccacctgctgttccgactctgcgccggagcatcggatgttcgccaagctgatcgccgactcgctggcggtgtggaccacggactataaaatcgatggcttccgcttcgatctgatgggctatcacccgaaagcgcaaattctctcggcgtgggagcgcattaaggccctgaacccggatatctacttcttcggcgaaggctgggactcgaaccagagcgaccgctttgaaatcgcctcgcagatcaacctgaaaggtaccggcatcggcacgttctccgatcgcctgcgcgactccgtgcgcggcggcggcccgttcgattccggcgatgcgctgcgtcagaaccagggcgtcggcagcggcgcgggcgtgttgccaaacgaactcgccagcctgagcgatgaccaggtgcgtcatctggccgatctgacccgtctgggcatggccggtaacctcgctgactttgtgatgatcgacaaagacggtgcggtgaagaaaggcagcgaaattgactataacggcgcgcctggcggctatgccgcagacccgacggaagtcgtcaactatgtttcgaagcacgacaaccagacgctgtgggacatgatcagctataaagcgtcccaggaagccgacctggcgacccgcgttcgcatgcaggccgtttcgctggcgacggtgatgctcgggcaggggatcgctttcgaccagcaaggttctgaactgctgcgctcgaaatcctttacccgcgactcctacgactccggcgactggttcaaccgcgtggattattccctgcaggataacaactacaacgttgggatgccgcgcatcagcgatgacggcagcaactatgacgtgattactcgcgtcaaagagatggttgccactccgggcgaagcggagctgaagcagatgaccgcgttctaccaggagctgaccgagctgcgtaaatcctccccgctgttcaccttaggcgacggcagcgcggtgatgaagcgcgttgatttccgtaataccggttcagaccagcaggccggtctgctgattatgaccgtggatgacggagtgaaagcgggcgccagcctggatagccgtcttgacggcctggtggtggtgattaacgccgcgccggaaagccgtacgctgaatgagtttgccggtgaaacgctgcagctgagcgcgatccagcaggcggcgggcgaaaattcgctggcaaacggcgtgcagattgccgctgacggcacggtcacgctgccggcatggtcggtggcggtgctggaaatgccgcagggcgatgcccagggcgccgggctgccggtcagcagcaagtaagacctgaacctcccggcccgcggcgtcataaccacgggccgggatggcgtgtcttgattaaggagaagcccgtgcttgttcgtcagcaagagccgtacccgcagtccgcgcccccgacggtagttggaaaaatggtgcagatcccctatgtgaccgtaccgctgtacgccgcgctgctgattgcgctcggctggttcggcggcgagcagtggcggaataagcccgagccgcagccgataaggcagccggtagcgcatgcggcgttagtgccgctgaatcaaccggcggtcaaaactgccgtgacggcggttaaagccgagccagaaatgaaggctgaaccagaaatagcgatcgatgaagatactctgccgcctctgcgctatagcgcgcacgtctacgcctcgctggcggagaaacgcagcattgtattaaacggacagtcctggaaggagggcgactcgccgctgccgaacctggttattgagcagattcagcaggatctcaccgtatttagcttcaacggtaaaacgtttaccctcgcggcgctggatgactggccgggcggggcgattgaggagagtccgcaggctgaataaaatagtgcgagcggaataaaaataagcgctatttattgccgcgcaggctatcaataaatggcgcaagttggcgattaaactggctgcattttgtggcttccggggtactgtcctgctggagctgttgatatagctgcgcgctgcgctggcttagcacattatcgtcaatattcgcccatccgcgttttttacccacgtttattgccgcacgattaatcgcttcatcggcgggcagatcgctgcggttgcatttattcttcagatagcgcgccccggcggcgacggaggcgagctgctcaagctgggcctgaccgctcacggcaggactgagggttgtcgaacgattttgctgacagcctgagagcagggcgaccgccataagcgggaatagaataaagttgcgcataatatattaatcggaaaaattaattggctgacagtttagcaaatatttgtccgcagtcatcagaaaatctgccaaattatcaatgttaagcggctcgcttttttatcattgtcgtcttttaaatttgtttttctttcacctgcatgatttttcttttatggcagaaatactattttccggcgttgccgttccgctttcttttggcggcatgtagaaggatacggacggacatgtttatgttgttaaaaaacataataatttcccttttgttacctgatgagcatgtaaaatgctggttaagaatgtcgcggtttagtgctatcctgtatcgcctggacaacaagtaccgtgtcccgaactattctgtcgatgaagccggtaacaatgtgatttgtatggtgaatttttaaagtgaaaatcatgcgagcgacatgataacgcgtcgcgcagttcataaatggtcgcctgaaagccaaaacggtcgggcgtcaatttgagagatttcttctttcccccaatcggggaaacattgagaatcaggcctttacgcctgtaagttgcggagaaaaagcatggcgggagatgaccgcgagccgatcggacgtaaggggagaccctcgcgcccggcaaaacaaaaggtaactcgccgtcgggtccgggaagaggactacgacgacgattacgatgatgactatgaggatgaaaaaccgatgccgcggaaaggaaaaggcaaaggcggtaaaccccctcgtcgtaaacgcgcctggctatggctgctgattaagattggggtcgtctgcgcggtgttgattgccgcctatggcgtctacctcgatcagaaaatccgcagccgcatcgacggtaaagtctgggatctgcccgcggcggtttatggccggatggtcaaccttgagccggatatgcagatcagcaaaaacgaaatggtgcgcctgctcaacgccacgcagtatcgccaggtgagcgcgatgacgcgcccgggcgaatacacggtacaggccaacagtatcgagatgatccgccgtccgttcgatttcccggacagtaaagaagggcaggtgcgcgcgcgtctgacctttaatggcgatcgtctggacactatcgagaatatggataacaaccgccagttcggtttcttccgtctcgatccgcgcctgatcaccatgctgcaatcggccaacggcgaacagcgtctgtttgttaagcgcaacggcttcccggatctgctggtcgataccctgctggcgacggaagaccgccatttctacgaacacgacggcatcagcctctactcgattggccgcgcggtgctggcgaacctgaccgccgggcgtacggtgcagggcgcgagtacgctgacccagcagctggtgaagaacctgttcctctccagcgaacgttcgtactggcgtaagattaatgaagcctatatggcgctgatcgtcgatgcccgctacagcaaggatcgtatccttgagctgtatatgaacgaagtgtacctcggtcagagcggcgataacgagatccgcggcttcccgctggcgagcctctattactttggtcgtccggtggaagagctgagcctcgatcagcaggcgctgctggtggggatggtaaaaggcgcgtcggtctacaacccgtggcgtaacccgaagctggcgctggagcgacgcaatctcgtgctgcgtctgctgcagcagcagcaggttatcgatcaggaactgtatgacatgctgagcgcgcgtccgctgggcgtacagccgcgcggcggggtgatctctccgcagccggcgtttatgcagatggtacgccaggagctgcaggcgaagctgggcgacaaagtgaaagatctctccggcgtgaagatctttaccaccttcgactcggtcgcgcaggacgcggcggaaaaagcggcgacggaaggtattccggcgctgaagaaacagcgtaagctgccggatctggaaaccgcgatggtggtggtcgaccgcttcaccggcgaggtgcgggcgatggtcggcggcgcggagccgcagtttgccggctataaccgcgcgatgcaggcgcgtcgttcaattggttcactggcaaaaccggcgacctatctgaccgcgctaagccagccgaaccagtatcgtctcaatacctggattgccgatgcgcctatctcgattcgcctgtctaatggccagacatggtcgccgcagaacgacgatcgtcgctacagcgatagcggtaaagtgatgctggttgacgcgctgacgcgttcaatgaacgtgccgacggtgaaccttgggatggcgctgggtctgccggcggtggtcgatacctggactaagctgggcgcgccgaagaatcagctgaacgccgtgccgtctatgctgctgggggcgctgaacctgacgccgattgaagtggcgcaggcgttccagaccattgccagcgggggtaaccgcgcaccgctgtccgcgctgcgttccgttatcgctgaagatggtaccgtgctctatcagagctatccgcaggcggaacgcgcggtgccggcgcaggcggcgtatatgacgctatggaccatgcagcaggtggtgcagcgcggtaccggtcgccagctgggcgcgaagtatccgggcctgcatctggcgggtaaaaccgggaccaccaacaacaacgttgatacctggtttgccggtattgacggcggtcaggtgaccattacctgggtgggtcgcgataataaccagccgaccaagctgtacggcgccagcggcgcgatgtcaatttatcagcgctacctggctaaccagacgccgacgccgctggtgctgactccgcctgaagacgtggtggatatgggcgtcgatggcagcggtaactttgtctgcagcggcggcatgcgctcgctgccggtatggacgacctcgccggacgcgctgtgccgccagggcgaacagatccaacagcagcagcttgagcagcagcaggcgaataacccgttcaatcagtccgggcagcagccgcagcagcaaaatcagcagcagcaaccgccgaagcaggagaagagcgatggcgtagcgggctggattaaggatatgttcggcagcaattaacccgccgttgcatcctgtaaaccggcgctttgtcggttgaatggaggcggaaatataggccctctactactccggtagtagagggcctttttatctctgtcatttaattaacagccgtttaaccccacacttaccgtctggttatttattcatcctttgatcgctcacagggggcatatttcttgccttgccgcgcgcgtttcgcctattatgtcactcgttataataataattctcgtttacgttatcattcacttctattagagatatacccatggcgcgtcttaaaactgctcagccaaatcactcgctgcgtaaaatcgcagttgtagtagccacggcggttagcggcatgtctgtttatgcacaggcggcagttgaaccgaaagaagaaaccattaccgtcaccgccgctccggccccgcaggagagcgcctggggaccggcagcgaccatcgcggcgaaacattcggctaccgcaacaaaaaccgatacccccatcgaaaaaacgccgcagtctatttccgtggtgacccgtcaggaaatggagatgaagcagccgacgacggtgaaagaagcgctggcctatacgccgggcgtattctcgactcgcggcagctcaaccacctatgatgtggtgacgattcgtggtttcaccacgtcgacaacggtgaataccaaccagtatctggatgggatgaagctgcagggtaataactattccgaagtatcgatggacccttatttcctcgaacgtgttgaggtgatgcgcgggccaacgtcggtgctgtacggcaacagcaaccctggcggtatcgtcagcatggtcagcaagcgtccgaccactgagccgctgaaagaaatccagtttaaaatgggcaccgataatctgtggcagacgggatttgatttcagcgacgccattgatgatgacggcgtgtggtcatatcgtctgaccggtttgggccgcagccaggacgcccagcagcaaatggcgaagtctacccgttacgcggtcgccccctcctttagctggcgtccggatgacaaaacggacttcactttcctgagtaatttccagagcgatccgtatgccggatattacggctggctgccgcgtgaagggacggtggtgccgtattacgacgccaacggtaaggcgcataagctgccgacggactttaacgaaggcgaggcggataataagatgtcccgccgtcagcagatggtgggctacagcttctcgcatcagtttgatgatactttcgccgtacgtcagaacctgcgttatgccaacgtccataccctctaccgttcggtctacggcaacggatatacgccgacaggcaaaatcaaccgtgcgtatgttcgctctgatgagaaccttaatacgtttaccgttgatactcagctgcagtctgatttcgctaccggcgcggtagggcatactctgttaaccggcgtggattattcgcgcatgcgcaatgatgtgaacgccgattacgggacggcttccgcgcttgacatgcagaacccgcagtacggcaatgcaaacgtgagcgttaacttcccctattcagtgctgaaccgtatggagcagaccggtctctatgcccaggatcagatggcgtgggataagtgggtgatgacgctggggggccgctacgactatgcgatggcttcaaccctgacgcgccctgcgaataccctcgccaaaaatcacgatcagcagttcacctggcgcggcggtattaactatctgtttgataatggtatctcgccatacttcagctacagccagtcttttgagccggtttccggatcgtcgcgggatggtaaacccttcgatgcttcccacggcgaacagtatgaagccggggtgaagtacgtaccgaaggatatgccggtcgtgctgaccgccgcggtatatcagctgaccaaagataaaaacctgacggcggatccgaacaacgcctcgttcagcatccagacgggcgaaatccgctctcgcgggattgagctggaggcgaaggcggcggttaacgccaacgtcaacgtgacggcttcctatacctataccgacgctcaataccagcatgacaccacctttaacggcaagcgtccggcggaagtgccgcgcaacatggcgtcgctgtgggcggactacaccttccacgaaaccgcgctgagcggcctgacggtgggtgccggggcgcgctatgtcggttcaacggtaagctattacaaaaacgatacttcgacggggaaaaaagatgacgtcttcaacgtcgcgggctacgcgttaatggatgccaccgtgaaatatgatttagcgcgctttggtctgccgggttcgtcgatcggggtcaacgtcaacaacctgttcgatcgcgaatacgtttccagctgctatagcgagtacgcatgctactggggcgctgagcgccaggttgtggcgaccgcgactttccgtttctaaccacttaacgggcgcggttcgccgcgcctctgaccaggttccgttatgcaggaaatcactccgcactccgatacgacgttttcactggaccgcgtgaccttccgcgtgcccggccgaacgctgctgcatcctctgtcgttaaccttcccggcgggaaaagtcacgggcctgattggccataacggctccggcaaatcgacgctgctgaaaatgcttggccgccatcaggcgccctcggacggggaggttttgctcgacggtcagccgctcgacagctggggcagtaaagcctttgcccgcaaagtggcttatctgccgcagcagctgccgccggcggaaggcatgacggtgcgtgagctggtggcgatcggccgctacccgtggcacggagcgctggggcgttttggcgcggcggatcgggagaaagtggaagaggcgattgcgctggtcgggctaaaaccgctggcccaccggctggtggacagcctctccggcggcgaacgccagcgcgcgtggattgccatgctggtggctcaggatagccgctgcctgctgctcgatgaacctacctcggcgctggatatcgcccaccaggtggatgtgctggcgctggtccatcgcctcagccagcagcgcgggctgacggtgatcgccgtactgcatgatatcaatatggcggcgcgctactgcgactatctggttgcgctgcgcggcggtgagatgatcgctcagggaacgcccgcggagctgatgcgcagcgaaaccctggaacaaatttacggcatcccgatggggatcctgccgcatccggctggcgcagcgccggtaagttttgtctattgatggaaaacctcacattcatcacgcggcggcgcctgctgaccgcaatggcgctgtcgccgctgctgtggcagatgcgcggcgcgcgggcggcggaagtggatccgcagcgtattgtcgcgctcgaatggctgccggtagagctgctgctggcgctgggcgttacgccctacggcgttgccgatatccctaactaccggctgtgggtcaatgaaccggcgctacctgattcggtgattgacgtcgggctgcgtaccgagcccaatctggagctgctgacgcagatgaagccgtcgtttctggtctggtcggcggggtacggcccgtcggcggaaaagctggcgcgtattgcgcccggacgaggattcaccttcagcgacggcaagcgcccgctgatgatggctcagcagtcgcttggcgaaatggctgatctgatcggcagacagcgggaagcgaagcgccatctggcggaatttgacgcgctgatggagagcctgcgaccgcgctttgcccgccgcggcgatcgtccgctgctgatgattactctgcttgatagccgtcacgtgctggtttttgcgcaaaactgcctgttccaggaggtgctcgaccgctttgccatcaaaaatgcctggcagggcgaaaccaccttctggggcagcgtcaccgtcggtattgaccggctggcggcctacagagacgccgacgttatctgcttcgatcacggcaatgcgcgggagatggcgcagcttatggcgacaccgctgtggcgagcgatgccgtttgttcgcgcagggcgttttcagcgcgtcccggcggtgtggttctatggcgcgacgctatcggcgatgcattttgcccgcgtgctggccgacgctcagggaggcccggcatgagatcgcgaatttcgcctttggcgacatcactgctgttgacgctccttctcgtcgctgctgcgctgacgctgttcaacctcaacgtggcgctgccgcgaagcgaatgggggcaggcgctgtggcagccgaatatcgataatatcgctcagatgctgttccactacagcctgctgccgcggctggcgatatcgctgctggtcggcgccgggctggggctggtgggcgtgctgttccagcaggtgctacgtaacccgctggcggagccgacgacgctcggcgtggcgaccggggcgcagctgggcatgacggtcaccacgctgtgggcgattcctggcgtgctggcgtcgcagttcgccgcgctggccggggcgtgcattgtcggcgcgctggtgtttggcgtgtcgtggggcaaacgcctctcgccggtgacgttgattctggcagggctggtggtgagcctgtactgcggcgcgcttaatcaactaatggctattttccatcacgatcggctgcaaagtatgttcctgtggagtaccggtaccctgacgcagaccgactggagcgtggtgcagcggctgtggccgcagctgctgggcggagcgattttaacgctgctgctgctgcgtccgctgaccctgatggggctggacgacggcgtggcgcgcaacctcggactggcgctctcgctggcgcggctgggggcgttgaccctggcgattatcattagcgccctgttggtgaatgcggtggggattattggctttatcggcctgttcgcgccgctgctggcgaagatgctgggcgcgcgtcgcctgctctcgcgcctgctgctggcggccctgattggcgcgctgctgctgtggctctccgatcaggttatcctctggctggcccgggtgtggatggagatctccaccggttcggtgaccgcgctgattggcgcgccgctgctgctatggctgctgccgcgcctgcgcagcattagcgcgccggtgatgaacggtggcgatagcgtgctggctgaacggcaacatgtgctgtggttcgcgctgggcgggctggcgattctgctgctggccatcgtcgcggcgctggctttcggccgcgacgcgcagggctggcactgggccagcggtacgctactggatgagctaatgccctggcgctggccgcgcgttctggcggcgctgttcgctggcgtgatgctggcggtagcgggctgcattatccagcgcttaaccggtaatccgatggccagtccggaagtgctcgggatcagctcgggcgcggcgtttggcgtggtggtgatgctgttcttcgtgccgggaaatgcctttggctggctgctgcccgccggtagcctcggcgcggcggcgacgctgctggtcattctgattgccgccggacgcggcgggttctcgccgcatcgcatgctgctggcggggatggcgctgagcacggcgtttaccatgctgctgatgatgctgcaggccagcggcgatccgcgaatggcgcagatcctgacgtggatttccggctcaacctacagcgccacgccggagctcgtgatgcgcagcggcgcggtgatgcttattctgctggcgctgactccgctttgccgacgctggttgacgattctgccgctgggcggcgaggcggcgagggcggtcgggatggcgctgacgccgtcacgtatcgggctgctgctgctggcggcatgtctgaccgcggccgcaaccctaacgattggcccgctcagcttcgtggggctaatggcgccgcatattgcgcgtatgatgggattccggcgtacgatgccgcatatggcgatctccggcctgattggcggagtgctgctggtgttcgccgactggtgcggccggatgctgatgttcccctaccaaatcccggcaggattgctgtcgacgtttatcggcgcgccgtactttatctatctgttgagaaagcagagccggtagcgtttcaccatcgcgatgcccggcgggcgtcgcgatgttatccccttttttgcccggattcagttaggactaactgcggaattctgcaactgctctaattcgttttccgtcacttccgtgagctggataaccagcgatcgctccatgccgttttccagcatccggttggcaatttttagtcgggcctttgcctcacccttttcctggccccattcaataaaaagctctttgccgtttttttccagccattcgtccagcgtttccatcgactcctcctgcggtatatgacttaccagtccattgaaaaaagccttagggttttcggtgtgaccgcgctgccccatatagctaaataacacttttagctgctcggcggtagtgtatcccgcgttaagcagaatccccaattgctcgagcagcaacatgagatcccgctggcgaatatgcttttgcaggagctccaggatcgcaatacgccgatgctgcataatcgcgttatcaggtatcaccgtgatatcgaccagcggaaaagggcggttgtagattatttttgcccactccggcaagtcgaacatactgtaccagttcattgagaaggggtagggcgaggttttgccctgataaaacaaaatgggaacaaccaacgggagatgtgtatttcccgcttccagatggcgctgcatggcggcgacgctatagcgcatgagacgaaacggcatctgcttgtccggtgagctttgatgctcaataagcacatggatatagcccgtcttattattgatttccaatgagtacagcacgtcggaatagtaagcccgcagatcttcttcaataaaactacctgattccagctgaagcgtgttgagatcgcacagcgagcgcaggtctgccggaagatggatatcaataaagtctctggcggtatcgatatgggccagtagctgtttaaaaatggcgtcatgcggtgtaggggacgattgtgttgtcattctgagcaatccttgcggctgagtttccgctgagaatctgcttttgcctgcccattgtctgccgacgattttgggttctacgaggcgggatgatgacaatctttcgaggcgatcgcgtttgcatcttgttatgcgtgggccgacgcaaaatgatgcttttaaacaagatgcgtattgccggggcaggggggccccggcgttgaggttacagcttagcgaaggcgttacgcgcggcggcgacggtgttgtcgatatcttcttcgctatgggcgatggacataaagcccgcttcaaacgccgacggcgccaggtagacgccctcttccagcatcaggtggaagaagcgtttaaaccgctcgacatcgcatttgaccacgtcctggtagcaggtcacggttggcgcgtcggtaaagaaaatgccgaacatgccgccgacgttattcaccaccagcggaataccggcatcgcgcgcggcgtccagcagaccctgggccagctggttagtgagctcggttagcgtctcgtgcacgccgggctgcgccacttcgctcaggcaagcgaaacctgccgccatcgcgatggggttgccggagagggtgcctgcctggtaaaccgggccggtcggcgccagggcatccatcacctcacgacgaccgccgaatgcgccaaccggcataccgccgccgatgattttgccaaggcaggtcagatccggcacaacgccgtagtaatcctgcgcgccggccagcgccacgcggaagccggtcatgacttcatcgataatcagcagcgcgccgaactcgtcgcacagcgcgcgcaggcccggcagaaactctggcagcggcgggatgcagttcatattaccggccaccggctcaacgatgatgcaggcgatatcctgcggatactgttcgaacgcggcgcgaaccgaggacagatcgttataggtacaggtcagggtgtgtttggcgaaatccgccggcacgcccggcgagttcggctggccgagcgtcagcgcgcctgagccggcttttaccagcaggcagtcggcgtggccgtggtagcagccttcgaacttgataattttgtcacggccggtgaagccgcgggccaggcgaatggcgctcatggtggcttcggtaccggagttcaccatgcggaccatatccatggtcgggaccagctcggtgaccagcgccgccattttaacttccatctccgtcggcgcgccaaagctcaggccgcgttcggcggcttcaaggaccgcgttgcggatggccggatggttatgacccagcaccattgggccccaggagccgacataatcgatatacgctttaccatcaacgtcgtaaaggtaagcgccgtcggcgcgctcgataaacagcggcgtaccgccgacgccggtgaacgcacgtaccggagagttcacgccgccgggaataagttcacgcgcagcgttatacagattttcagatttgctcattgccagggtcctggttcgtgaaaaatgttttgtcgactattctaagttattccaggaaggttatgaaagttttgcccaattgaaacaatggggtcgcggcgcatttttttgacgacggagcctgtccggttggctagaatgaccttctttctatttgtattacttattattgataatggcatgaaagcagaaaacccctcttcttcagcacatcagttcgtacgcgttcgccgcagcgatgccgtgcgtcggttgattcagcgtgataaaacgccgctggcggtgttattaatggcggccgttgtcggcacgctggcggggctgatcggcgtcgcgtttgaaaaaagcgtcaactgggtgcagaacctgcgcataggcgcgctggtagaggtggcagaccactggtttctggtctggccgctggcctttatcctctccgctttgctggcgatggtgggctattttctcgtccgtcgttttgcgccggaagcaggcggctccgggatcccggaaattgaaggcgcgctggaggagctgcgtcccgttcgctggtggcgcgtactgccggtgaagtttatcggcggcatggggacgctgggtgcgggcatggtgctggggcgcgaagggccgatggtgcagcttgggggcaatcttgggcgcatggtggtggacgtttttcgcatgcgcagtccggaagcgcgccatacgctgctggcgaccggcgccgcggcggggctctccgccgcctttaacgcgccgctggccgggattctgtttattattgaagagatgcgcccgcagtttcgctacaacctgatctccattaaagccgtgtttaccggcgtcattatggccaccatcgttttccgtatcttcaacggcgataaagcggttatcgaggtcggtaagctcagcaatgcgccggtcaacaccctgtggctgtatttgatcctcgggatgatttttggctgtgttggcccgctgtttaatacgctggtgctgcgcacccaggatatgttccagcggctccacggcggcaacattaaaaaatgggtgctgattggcggcctgatcggcggaagctgcggcgtgctgggtctgattcagccggcggcgtccggcggcgggtttaacctgattcccatcgccgcggcgggcaatttttccgtcggcctgctgctgtttatttttatcgcgcgggtgattaccacgctgctttgcttctcttccggcgcgcccggcggtatctttgcgccgatgctggcgctggggacgctgctgggcacggcgtttggcatggcggcgacgccgctgtttccggcctatcatctggatgccggcacctttgccatcgccgggatgggggcgctgctcgccgcctcggttcgcgcgccgttgaccggcatcgtgctggtgctggagatgaccgataactatcagctcattttgccaatgattattacctgtctcggcgcaacactattggcacaattcctcggcggtaagcctttatactcgactattctgcagcgcaccctggcaaaacaaaaggcggaacaggaagcaaaggcgcagccggtcggcggggagaatacttgaacgatttactcgggtattggataatggctcaaaaggtcgggttattctttaaccggtcagaagtatcaatgggagcataaaatgagtgatgacgtagcgttgccgctggagtttaccgaagccgcggcgattaaagtaaaagacctgattgcggatgaagacaatccgaacctgaaactgcgcgtgtacatcaccggtggtggctgcagcggtttccagtacggctttaccttcgacgatcaggttaacgaaggcgatatgactatcgagaagcagggcgtcggcctggtggttgacccaatgagcctgcagtatctggtcggcggcgccgtcgattataccgaaggtctggaaggctcgcgttttatcgtgaccaacccgaatgcgaaaagcacctgcggctgcggctcctcgttcagcgtctaaagatagtgcgcccgggagcctcttctcccccgccctctcatacagcgagagggcgcaaacgctaaaaacggtaacgttaaggttaccgttttgcttttattaccgtccattctcatcaagcgcgaacgttggcagcttcaggtgccagcggatggccgccagcctgatgaccagcgtgaccaccatacctatcatcgccgcgttttctaacggaacctgaaaggtgtagtacgccgtcgcatgcacgatgccgccaacgatgcaggccgtcgcgtagatttccgtacgcagaatcatcgggatttcacgcgccagcacgtcgcggatgatccccccgccgacgccggtgacgacgcccatgcagacggccaccagcggtccgctatgggcaagaaaggctttgttgacgccaataccgacaaataccgccagaccgacggcgtccagcaccggcagcacccatttgggtaaccggcgcggctggcgtaccagcaggatagtgaacatgctggtgaccatcgccaccaccagatcggtagggtctttaacccaaaataccgggccgttagcaagggccatatcgcgaatggtgccaccgcctaccgcggtcaccacgcctaataccagcacgccgaaagggtccatgcgcagctttccagccagcagaacgccggagatggcaaacacggcggtgccaatgatatccagccaatagacaagcatcgtcagttcccacttagagtctatcccattaggcttttttatttgccagtttggccctgggcagtgctcaccgccctcacgtaccgcgtgtacgctccgggtgttccgcgctgtccgtgtccaaactggctgcaacaattgcgcctggtgggatagcctttttgcacctggattagcaggtgattattttatctgctcgagcgcagtacagagttgttttgcggcgagaataatacgtgggctcgcgcgttcaaaccagtcgccatgtagcgcaataaaagaaatttttagctgattctgccaatagcgctcaacggcgggaagttgactggggtcgccggcgatgacaatggcctgcggctgccttgccagcacctgttcacggctcacctgcggccagggaacccggctggcggcaaaaatgttttctcccccacacagcgtcagaacctgatcctgaatcgagcctttgctggtggtaaagagagggttggcgccgaactgtaaaaaaacgcgttttttcggcccgctcgcgtagcgggtttttaaggcctggtaggcgtcctgcattttctgcgccgcctgccgcgccttttccggctgagggctccactgcgccagctggcgaagcgttgcgataatctcttcgatagtcgatgtttcgacccagatgacttttatcccgagcgagcttagctgattcacctggcgttcagcgttaccgccgcgccacgccagcaccaggtcgggcttaagggcgacgatgcgttccagattcatcccctgccagctggagacctgctctatctttgcggcttccgggggataatcggaatagctgctgacgccaaccggcgtaataccggcggcaaacgccagttcagtattggcgggagagagcgtaatcacccgcggcgcggcgaaaagccacgccggggcaagcagcatcaggacggcaagcgccgcgttgagcgacttagccacgagccaggtgctgcaccaggttttccaccatcagggtggattgcttcgcggcaacggcgagaaactcgtcgaagctcagatgcgactgctgatcggcaacatcggagatggcgcgaacgacaacaaacggtacgccatagttgtggcagacgtgcgcgatggcggtggcttccatttctaccgcgacggcctgcgggaagttgtggcggattttggcgagaccaatggaaccgttgatgaatgcatcgccgctgacaatgagtccgcgaaccgcgttaagattcagcgcgctgatgcaggtctctgcggcggcaatcagcttatcatcggctttgaaaccggcagggcagcccggtagctggccatactcatagccaaacgcggtgacgtccgcgtcgtgatagcgcgtttcgtcggagacgacgatatcgccaaccttcagggtcgacgcgaggccgcccgcagaaccggtgttaataatcacatctggcttgcagtgctccatcagcagagtggcgcccatggcggcggcgactttgccaatgcccgatttcaacaaagcgacatcaacgccctgcagctggccggtgtagatttcgctgccgccgatagtgatggtctggcggttgtcgattttgtcgcgcagaagggtaacttcttcttccattgcgccaataataccgattttcatagatttactcgcgatgtgtgggttttagcggcatagtctatcatgcgcttagaaggaaacgttattgctcgctcgggggagatcatggctaagatcgattttcgcaacaagattaactggcgtcgccgctaccgttcaccgcagggcgttgagacggagcgtgaaatcctgcgaattttcgaaagcgatcgcggacgcatcatcaactcgccggcgatccgccggctgcagcaaaaaacccaggttttcccgctggagcgcaatgccgcggtgcgtacgcggctgacccactctctggaagttcagcaggtgggccgctacatcgccaaagaggtgctgagtcgtctgaaagagcagaagctgctggaaagctacgggctggatgagcttaccgggccgttcgagagcattgttgaaatggcctgcctgatgcacgatatcggcaatccgccatttggccattttggcgaggcggcaattaatgattggttcagccagcggcttttccccggcgatgcggccagccagccgttaaccgacgatcgctgcgtggtcgcggcgctgcgcctgcaggaaggcgatagccagctgaatgagctgcggcgtaaggttcgccaggacttatgctggtttgaaggcaatgcgcagggtattcgcttagtgcatacgctgatgcgcatgaatctcacctgggcgcaggtgggctgtattctaaaatatacacgtccggcatggtggcgcggggaagcgccggccagccacaattatttaatgaaaaaacctggttattatttagccgaagagggctatgttgcgaggttgcgtaaagaactggatctggctccttacaatcgcttcccattaacgtggattatggaagccgcggatgatatctcatattgcgtcgccgaccttgaagatgcggtagaaaaacgcatcttcagcgtagagcagctttatcagcatctctatgaagcctggggcgttcacgaaaaaggctccttgtttaatcaggttgtcgaaaacgcctgggagaaatcgcgtgcgaattctctgagccggagtactgaagatcagttttttatgtatttacgggttaatacgctcaatagactggtaccgtacgcggcgcggcggtttattgataacctggcgaagatttttagcggcgattttaatcacgcgctgcttgaggacgatagcgattgcagtcagctgcttgaactatacaaaaatgttgcggtaaaacatgtgtttagccatcctgatgtcgagcagctggagctgcagggctatcgcgtgatcagcggtctgttagatatataccagccgctgttaaaattatcgctggatgagtttagtttgctggtggaaaaagagcgggtgcgaagtttaccgattgcatcacgtctttttcagaaactttcaactcgtcatcggttagcttacatagaagccgtaaataagatttcgcgcaataatccggagtttccagtgatggaatattattatcgctgtcgtctcattcaggactatatcagcggaatgaccgacttgtatgcatgggatgaatatcgacgattgatggccgtagaataagggtgagttttgtaaagacggacaataaatttttacttttaccaaaacttcattccggaacttcgcgctataaaatgactctgatagtcaccaacacagcaactattcgttatctgaaattgagattgaaacctatgaaaaaaaccacgttagcaatgagtgccctggctctgagtttaggtctggcgttgtcccctctctctgcgagcgcggcggaaacagcttcttcggcgactaatgcgcagcagatgccaagcctggcgccgatgctggaaaaagtgatgccgtcggtcgtgagcattaacgttgaggggagcaccaccgttaatacgccgcggatgccgcgtaacttccagcagttctttggcgacaattcgccgttctgtcaggatggttctccgttccagagctctccgttctgtcagggcggcgggcagggcggcgcgccgggtagcgacggcggccagcagcagaaatttatggccctcggttccggggtgattattgatgccgctaaaggctatgtcgtgactaacaaccacgtcgtggataacgcgactactatcaaagttcagctcagcgatggccgcaagttcgacgcgaaagtggtcggcaaagacccgcgttctgatattgcgctgattcaaatccaggatccgaaaaacctgagcgcgattaagctggcggactctgacgccctgcgcgtcggcgattacaccgtggcgatcggtaacccgtttggcctgggcgaaaccgtgacctcggggatcgtttccgccttgggccgtagcggcctgaacgttgaaaactatgaaaactttatccagaccgatgcggcgatcaaccgcggtaactccggcggcgcgctggttaacctgaacggcgagctgatcggtatcaacaccgcgattctggcgccggacggcggcaacattggtatcggcttcgctattccgagcaacatggtgaaaaacctgaccgatcagatggtcaaatttggccaggttaagcgcggtgagctgggcatcatggggaccgagctgaattccgaactggcgaaagcgatgaaagttgacgctcagcgcggcgcgttcgtcagccaggtgatgccgaactcggcggccgctaaggcggggattaaagccggcgacgtgattaccacgctgaacggtaaatcgatcagcagctttgccgcgctgcgtgcccaggtgggtaccatgccgatcggcagcaaagtcgagcttggcctgctgcgtgacggcaagccggtgacggtgaccgttgagctgcagcagagcaatcagaaccaggttgactccagcaccatcttcaacggtattgaaggtgcggaaatgagcaacaaaggtcaggataaaggcgtcgtggtgagtaacgtgaaagcgggaacgccggcggcgcagattggcctgaagaaaggcgatattatcgttggcgcgaaccagcagccggtgaaaaatattgccgacctgcgcaaaatttttgatgccaaaccgtcggttctggcgctgaatatccagcgcggcgatacgtcaatttatctgctgatgcagtaatccctgacggttcgcaaagccccttttctccttgcggaggagaggggcttttttatttctgccgccccttccatttttcgttctgtgatatcttccacaactccatatttcttagcccggctttgtgcaaatgcacaatgcggcgtgttgccaactcttttatgctggtagcctgctcacgggagggttacatggctggctggcatcttgataccaaaatggctcaggatatcgtggcgcgtacgatgcgcatcattgataccaatattaacgtaatggatgcccgcgggcgcattatcggtagcggagaccgcgagcgaattggtgaattgcacgaaggcgcgctattagtgctttcccaggggcgcgttgtcgatattgatgatgccgttgcccgacatctgcacggcgtgcgccaggggatcaacctgccgctgcgtctggaaggggagatcgttggcgttatcggcctgaccggcgaaccggagtcgctgcgtaaatacggtgaactggtgtgtatgaccgccgagatgatgctggaacaatcgcggctgatgcatctcctggctcaggatagccgtctgcgcgaagagctggtgatgaacctgattcaggcggaagagaacaccccggcgctgaccgagtgggcccagcgtctggggatcgatctcaaccaaccgcgcgtggtggcgatgattgaagtggatagcggccagctgggcgtagacagcgcgatggcggagctgcagcagctccagaccgcgttgaccacgccggaccgtaataatctggtggccattgtctcgctgaccgaaatggtggtactgaagcccgcgctgaacgcctttggccgctgggatgcggaagatcactgcaaacgggtcgagcagctcattagcaggatgaaagagaacggtcagctgcgttttcgcgtggcgctgggaaacttttttaccgggccgggcagcattgctcgctcgtatcgcaccgccagaaccaccatgatggtcggtaaacagcggatgccggagagccgtagctatttttaccaggatttgatgctgccggtactgctggatagcctgcgcggcggctggcaggccaatgagctggcgcgcccgctggttcgcctgaaggcgatggataacaacggcctgctgcgtcgcaccttacaggcctggtttcgtcataacgtgcagccgctggcgacgtcgaaagcactgtttatccaccgcaatacgctggaataccgtttaaaccgcatctctgagctgacggggctggatttgggtaattttgacgatcgtctgctgctgtatattgcgctacagctcgatgagcagcgctaaaaacactcccgccgcaggcgggagtggggacgggaattacaggcgctgcagcccgctggccgtgacttgccaggagacggtatgaggctgtggccaggcgttaccgttttgcgggttgataatgacggagcgatcgccggcttcggcatggaagacttcgatgatatagccttcatcaagtattgccgtatcaatatagtcgccaagctgcgctgaacctttaatggactggcgataaaccaccgagccgcgcgtattgtagatattcaccgcggcataggccgtcgtaaagtgcttattcggcaccacggggctggcggtaaaggtgagcgcgccgcggccaatatccatctccatcgtcgcaaaacgaatattatcattgccaagtagctgccaggagaagagatcgccatacagctctgttgcctcgtcctgagcatccgtggtttctttatcctccggatctggcaccagcgaacaggcctccagcccatccttcactacccgccagcggttgcgttgcttcagcgtaatggcgcgatgcgtcgtatcattgctggcgctggagcggaatggctcatcatggaaaacctcaatgatcatgttttcagcgagcgcgagagtttcgctgtttgccaggttgttggtcgctccggcatagctgcggtgataaaccaccgtttcgtccgctccggttaccgtaatgctggcataggtatgggaaacataatacgggtgcggcgcgccggtacgcgtggcgaccgtcatggcgtgctgctgattatcgataacgatctggcaaaaatctttattgccttgccctctgagattgagggtaacgcttttgcccgtcagttcgcccggttcgctattatcctgaggcaggacgtcggcatactctttaagcagcctgctgcgctgaggctcttcaatatgggggagcatcagccagagatcgtttttacatacgctctcttcctgcgctaatagcgagggctgcttacgcattgcctgcgcgtcatgctcgaaaatagccagtaaatcctctgccggattattgttgagaataaagttgtaaagcccactctcatcaatacgcattagctggcatttctcacccgctaccagcgttaaatactccggagaggttttcagccgccccggctcgacgtgagtaatatataagtgatagtgaggaccgaagggaataacctccttaccggtggcgcagttcgttccgttcatattgcgctcgaatactttttcgccgctggcggaaagtacgcatacgccggcatagagcgcgtcagggtagttgttgtgcggcgtggcgctggtaatattcagcgtaagctgctgattttcgtaatcgatatccagatatgcaaacggcgtgtcgccaatacctaaaaagctcatcgttacgttacgcccgcgggaatcgcgttgtcgggtgtagttgatggtagccgcatttgtcccttcttttacgacgagatagctgatatccggacgatatttttgtgaacgacctttcggaagatcgatctggtaaatgccgattggtatgtcattcaggatcaacgtgtcatcattaacgatcagtgaataatgcgtgccacaattatctttaatcgtcagcgttcgcccgtaaatttgttccagctggtcgatattgaacgtcagggatagcgtccccgttttgcctaatgccgccagttcgctgttatccaccagccacacgaaggagtccagccccagctgccgccgcgcgctatcccattcgctttgcggaaggaaaagatacagcggatagagcggttttgccgccagcgcggcgatatctcccttagtggtaatttccagcgttaagccgcatagctcgataaatggggtcacatcataccctgcggcggtggcgatagcggtagccagcatatcgacaagctgatgatcggacggccggaagctatcgccgttggccagttcgcgatagttctggttgaagctgcggaaggctttggttcctgcttttagcaacatcagcatcaggaattgcaggcgcggacgcaggccccagctggtgaccgaaacctggtctcgaatataggtcatcagctggagttcctgcacggcctgctgaccatagttatagagccagccatcaacataaagatgattatcctgactcagggtgagctgctggtaaaaagcggcgtaaatattgttccacacttcgttgacgggcagagtggtcgactgcataaacttaccctgatacccgtgcgcaatttcatggagaataacccattgcgtcgcaacgttatccagccagccttcacctaacgttgatgatgtatgagcgcaccacctggtgaaataataggctgcgccgaagccatgtttatctgcccgcacaaagtagcggttggcgacatcctggttccacggtgcgtcaggattatcgcttagtccagccaagtcgttatagcatttgaaaaggtgggtataaaaacggtgcagtgccggtaagcccgctttcatcgcattatcgcggtcggcatagggcagcagcagggtaatcacatctaaatcaagcagcgcgagtgcggattgatttttctcccagctgaggaaaaattcatcctcagattggcccgctttccaggtcggcagcggtttagttgcggcaggctgctggtagatgacggtaaattcacagggctggtcggtaaacagcgtatcgacaaaaggaacggtgtcgaccgttgcgcagaccgttttccagccggtggcgatcgtgcaggtgctctctagcgcggtatcattgcaaagcaggcgcagaatcgagttgccgttgctgatatccggttggcgaatgtgcagcggcgtattggcgggcagaataaagcccagcggctggcgatcgtgcagccgtcctttttcaaagccggccttatccagccagggcgcagattgtagggtataaaatttttgttcaatttcctgtgtcatcgtatgatctcctttcaggtggaaattgaacatacagcgaattattttattatgtcattcatgtagatagggatatgagatgaaatgatatcagagaggaatagctgatattcgctgatgctgccggtgggggatgagtgagaaaaaagagggtgaggcagagggaaacagggccagtacctggcccgtatcaggcttacttattgcgggtcagtttttccagatcggattcgatttcgctgatcttattcgtcaccacgctttcgaggtgacgcagatcgtcgaggatcttacgtttcagatcgatttcggtgcgatcgcgctgacagatttgatccagctcgtcgatgatatagcgtaggttagggctaatctcctggacttctttatatccctggcccacgccgtcggcgaccacggttttgcgctgacgcggatatttgaacttgacgctcttggcgaagaactcgcctttatccttctgaaagtagattttcagaatgtcgttgttggcttcctgccgcaggctatagcgatcgatttcatcaggattggtaataccaagacttttcagattatcgtacataacggtacctttgatatcatcgtaatctttgaataattaacgaaaaaatccatcttcgccagctcaatatataaaaaaagcgggatgcctcccgcttttcatgctgcttagtcgatggtacgcagaagttcgttgattccaaccttgccgcgggttttggcatcgacttttttgacgataaccgcgcagtacaagctgtacttgccatcttttgacggcaggttgccggagacgacgacggatcccgccggaacgcggccgtagaagacttcaccggtttcgcggtcgtagattttggtgctctggccgaggtatacgcccatggagataacggaaccctcttcgacgatgacgccttcaacgacttccgaacgcgcgccgataaagcagttatcttcgataatggtcgggttagcctgcagcggctccagtacgccaccgatgccgacgccgccggacaggtggacgtttttgccgatctgcgcgcaggaacccacggtcgcccaggtatcaaccatcgaaccttcgtcaacgtaggcgccgatgttcacataggacggcatcagaaccgtgttgcgagcgatatacgccccctgacgaacggccgccggcggaacgacgcggaaaccttctttctggaaacgcgcttcatcataatccgcgaacttcattgggactttatcgaagtagcggctttccgcaccatcgataacctggttatcgttaatacggaaagagagcagaaccgctttcttcagccactgatgggtgacccactggccgtcaactttttcagcgacacgcagcgcgccggaatcaagcagagaaatcacctggttaaccgcttcgcgggttacggtatccacgtttgccggcgtgatgtcggcgcgacgctcaaaagcggactcaataacgttctgtaattgctgcattgtttactctttccatttacttaaaaaaatacgttaccctttatcgtttggattgagggcctctgtcaaccgttgttgcacttcttgctgtagctcattattaagggcgcgccggtctgcggtggcgattataaataaatcttctactcgctcaccaattgtcgtaattcgcgcgccgtggagcgaaattccgaggtcggcaaatacctggccgacgcgcgctaacagacccggctggtcgagagcaatcagctcaagaaaggatttccggtcggtatgcgtcggcaggaaattcacctccgtcggcacggaaaaatgcctcagcttcgccgcctgacgacggggcgccgggggctgccagctgcgctggctgatggtctgttccaggcccacgcggatcatttcgtgcctgtcggcggaaagcgggctgccgtccggctcaagaacaataaaggtatccatcgccatgccatcgcgggtggtgaagatctgcgcatcgtgaacgcttagattacgtcgatccagctcgccgcaaacggcggcgaagaggtaaggacgatccggactccagatgaagatctcggtgcccccgcgcgaggcgtgggaactgagcaggatcatcggtttgctgagatcgtgctgcagcagattacgcgcgtgccaggcgagctggtttggcgtatggcgcacaaagtagttggcgcggcagcggttccagatttggtgcagcgcctgttcattaatattttccatccgcagcagcgccagcgcctgtagctggtggtgacgcacccgctcgcgcatatccggcgtgttttgcatcccccggcgcagctgtttttcggtggcgaaatagagctcacgcagcaggctctgcttccagctgttccacaggttttcgttggtggcgcagatatcggcgacggtcaggcagaccaggtagtgcagacggttctccgtttgcacctcttcggcaaactgcttgatcacttccggatcctgaatatcgcgacgctgggcggtgaccgacatcagcagatgatgacgcaccagccacgccaccagctgggtttcgcgcgagttaagaccgtgaagctcggcgaatttcagcacgtcctgcgcgccgagaatcgaatggtcgccgccgcgccctttcgcgatatcgtggaagagggcggcgataaggatcagctccggatgcgtcaggcgcggccacagttcaacgcacagcggatgccggctgcgggtctcttctttggcgaagctctcaagcttaagcagcacgcggatcgtgtgttcatcaacggtataggcgtgaaacaggtcaaactgcatctgaccgacaatatgcgaccattgcggcatataggcccacagcacgctatggcggtgcatcggcagcagcccccggctgaccgcgccctgatggcgcagcatgctgaggaacagggtccgcgcttccggaatatagcaaagcggctgcgtcagatgacgacgggcgtggcgcaaatggcgaagcgtggtggagtagatgccggtaatgctgctgttacgcaccatcataaagaacatgcgcagaatcgcctgcggttcgcggatgaacagcgagtcatcgcgcagatcgattagcgtgccgcgcagctgaaaatcatcgtcaattggccgcggcttctcatcttcggtgagcgccagaatcgcctcttcgaacagctggatcagcatttggttcagctcgctcacccggcgggtgacgcgaaagaaatccttcatcatgtgctcgatcggctggttgctttcgccttcgtaacgcaggcggcgggcgacgctgaactgcctgtcgaacagcagacgattatcgtagcggttgagctccagatgcagcgcaaagcgaatgcgccacagctgatgcaggcattcgttaagctcgttgcgctcggcttcggtcaggaaaccgaagccgaccatttcatcaagcgaggtggcaccgaaatggcggcgcgcgatccactgcagggtgtgaatatcgcgcaggccgccggggctgcttttcacgtccggctcgaggttatagctggtcccgtgatagcgctgatggcgtacattctgctcttcgacttttgccgcaaagaacttttccgatggccagaagccgtcgctgaatatgtgtttttgcagttcaaggaacagcgcgacgtcgccaataagcagacgcgattcaatcaggttagtggcgacgctgaggtccgacagcccctccagcaggcactcttcgagggtgcgcacgctgtggccgacttccagcttgatatcccacagcagcgtcagcagctcgccgaccttctgcgcctgctcatcgggcagctttttacggctcaggataagcagatcgatatcggaaagcgggtgcagttcgccgcggccgtaaccgccgacggcgaccagcgcgatgtcgttcatcgacccgaacccgtactcgacccatagccgctgaagcagctgatcgataaattcggtgcgcgcctcaatcaatctctctgcggcgatgccgtggtcaaacgcttcgcccagccagcgctgaaaagcgtcgatgtgcgccttgatagccgcgcagttgaagtcgctctgcggccagcggcccggattcgccggctggtcgtccagggcaggggagacagtatcagataaagagttgctcatcgcgccaccataataaaaaactatcacccataaaaaatcgccgggagcgatttttaacgtcgcttgcggcggcccatagggtgacgggcaggacgcccgtcataaaaaatcgccgggagcgatttttaacgtcgcttgcggcggcccacagggtgcccgtcataaaaaagccggctggcgccggcttttcatcattcgttgtgcgagattatcgccgggatggtgtcatccttgcgtaacgtcagtatttcgcagccgctgtctgtcaccacaatagtatgctcatactgcgcagacaagctccggtctttggtttttaccgtccagccgtctttcatactgcggatctcttttttacccgcgttgaccatcggctcaatggtaaaggtcatgccgggtttgagcaccacgttggtttccggagagtcgtaatgcagcacctgcggttcttcatggaaaccgcggccgataccgtggccgcagtactcgcgcacgacggagaaaccttcggcttcaacgtatttctggatagccgcgccgatagcgcgcagattaacgcccggtttgaccattttcagggccagatagaggctttcctgggtaatgcggcacaggcgctcgcccagaatggtcggtttaccgacgataaacatcttcgaggtatcaccgtggaaatcatctttaatgacggtgacgtcaatgttgacgatatcgccatctttcagcagcttgccgtcgtccgggatcccgtggcacaccacttcattaatagagatgcagacggatttcgggaagccgtggtagcccaggcaggcggatacggctttttgttcgttaacgatataatcgttgcagatgcgatccagttcgccggtgctgacgcccggttttacgtagggttcgatcatttccagcacttcagcggccaggcggccggcaacgcgcattttttcgatgtcttcagatgtcttgatagaaatagccatggattgtgtccagcagtgtcgattttttcgacaataatagattatgtcggaacaatgttaacagtccgggcgtcctgctgccaaattgagaatcattagcagcacgcgacgtcaacaacagttggtgtctgctcctgttttgtggtataaagcgcgccggacttctgttccattctcagatacacaagatggactgaagcgacaaatctcactttgtgtaacaacacacacgtatcggcacatattccggggtgccctttggggtcggtaatatgggatacgtggaggcataaccccaacttttatctatagaggttttaaacatggcaactgtttccatgcgcgacatgctcaaggctggtgttcactttggtcaccagacccgttactggaacccgaaaatgaagcctttcatcttcggcgcgcgtaacaaagttcacatcatcaaccttgagaaaactgtaccgatgttcaacgaagctctggctgaactgaacaagatctcttctcgcaaaggcaaaatccttttcgttggtactaagcgcgctgcaagcgaagcggtaaaagacgctgctaacagctgcgaccagttcttcgtgaaccatcgctggctgggcggtatgctgactaactggaaaaccgttcgtcagtctatcaaacgtctgaaagacctggaaactcagtcccaggacggtactttcgacaagctgaccaagaaagaagcgctgatgcgcactcgtgagctggacaagctggaaaacagcctgggcggtatcaaagacatgggcggcctgccggacgcgctgttcgttatcgacgctgaccacgagcacatcgcaatcaaagaagcaaacaacctgggtattccggtatttgctatcgttgatactaactccgatccggacggcgttgacttcgttatcccgggtaacgacgacgcaatccgtgcagttagcctgtacctgagcgctgttgctgctaccgttcgtgaaggccgttctcaggatctggcttctcaggcggaagaaagcttcgtagaagctgaataataaggcatacccttatttagtaccgtgtataaataggggcctcttagcggcccctttttcactttcaaatctgtctggttcctggaaccgggccgatcacatctcccgaggaataaagaatggctgaaattaccgcatccctggtaaaagagctgcgcgagcgtactggcgcaggcatgatggattgcaaaaaagcgctgactgaagcgaacggcgacatcgagctggcaattgaaaacatgcgtaaatccggtgctattaaagcagcgaaaaaagcgggcaacgttgccgctgacggcgtgatcatcactaaaattgatggcacctacggcatcattctggaagttaactgccagactgacttcgtggctaaagatggtggcttccaggcgtttgcaaacaaagttctggatgcagctgttgcaggcaaaatcaccgacgttgaggttctgaaagcacagttcgaagaagaacgcgttgcgctggttgctaaaatcggtgagaacatcaacatccgtcgcgtttcttccctggaaggcgaagttctgggctcttaccagcacggcgcgcgtatcggtgttctggttgccgctaaaggcgcgagcgaagagctggttaaacagctggctatgcacgtcgctgcaagcaagcctgaattcgttaagccggaagacgtttccgctgaagtggtcgaaaaagagtaccaggttcagctggacatcgccatgcagtctggcaagccgaaagaaatcgcagagaaaatggttgaaggccgcatgaagaaattcaccggcgaagtttctctgaccggtcagccgttcgttatggacccgagcaaatccgttgctcagctgctgaaagagcacaacgctgacgtgactggcttcatccgctttgaagtgggcgaaggcattgagaaagttgagactgactttgcagcagaagttgctgcgatgtccaagcagtcttaattttcaaaaggagccgcctgagggcggcttctttttgcgcctaatgtgtaaattcagccaaccgctatagtgggcacgctgaaaagcgacgtacaatgtcgccagaataaattcatctcattcgttgacagtctcaggaaagaaacatggctaccaatgcaaaacccgtctacaaacgtattctgcttaagttaagtggcgaagctctgcaaggttcggaaggcttcggtattgatgcgagcatacttgaccgcatggctcaggaaatcaaagaactggttgagctgggtattcaggttggcgtagtgattggtggcggtaaccttttccgtggtgctggtctggcgaaagcgggtatgaaccgcgttgtgggcgaccacatgggcatgctggcaacggtcatgaacggccttgcaatgcgtgatgcacttcatcgcgcctatgtgaacgcccgcctgatgtcagcgattccgctgaatggcgtgtgcgataactacagctgggcggaagctatcagcctgctgcgtaacaaccgcgtggtgattctttccgcgggtaccggcaacccattctttaccaccgattccgctgcctgcctgcgcggcattgaaattgaagccgatgtggtactgaaagccaccaaagtcgacggtgtatttaccgccgacccggccaaagatccttccgcaacgatgtacgatcagctgacctacagcgaagtactggataaagagctgaaagtgatggatcttgcggcctttaccctggcgcgtgaccacaaactgccgattcgcgtattcaatatgaataagcctggcgcgctgcgccgcgtggtgatgggtgaaaaagaaggcacattaattactgagtaattcccgttagcgtcaaatacgggtaatattcggccttactttttcgggtttttgacccgatggttttcaacatgctctgtggacggaatgctgcggctgacccgtagcctgaaagacgctgagcataaacatgactatacttagctcacttttgcagtgggcgaccgtctggtctgtctgagacaaattttcaaggattcgtaacgtgattagcgatatcagaaaagatgctgaagtacgcatggacaaatgcgttgaagcgttcaaaacccaaatcagcaaaatacgcacgggtcgtgcttctcccagcctgctggatggcattatcgtggaatactacggcacgccgactccgctgcgtcagctggctagcgtaacggtagaagactcgcgcacgctgaagatcaacgtcttcgatcgctccatgagcccggccgttgaaaaagcgattatggcttccgatctcggtctgaacccaagctctgcgggcagcgatatccgcgttccgctgccgccgctgaccgaagagcgtcgtaaagatctgaccaaaatcgtgcgtggcgaagctgaacaggcgcgcgttgccgtacgtaacgtccgtcgcgatgccaacgacaaagtcaaagcgctgctgaaagagaaagagatcagcgaagatgacgatcgccgctctcaggaagatgtgcagaaaatgactgatgctgctatcaagaaagttgatgcggcgctggcggataaagaagcggaactgatgcagttctgattctctgccgacacgcaggtctgacgatcggcctgcgtaaaatctgaaacgccgtacaggagaccgtacgctcaattttcgggattgcgtttagacggctggccttgtagcctttggcgccatgtcaaaggccttgcgcctccgctctgtcaaccgataattgatgcataagggtttgctggcggcgttttgctttttatcctgtcttcattattctggacgcctcatgaagcaattaaccattcttggttcgaccggttctatcggctgcagcacgctggatgtggtgcgccataatcctgatagcttttctatcaccgcgctggtcgccgggaaaaatgtcgaccgtatggttgaacaatgtctggaattctcccctcgttacgcggtaatggacgatgcgcacagcgcggagctgctgcgtgcgcaactgcgcgagcagggctgccgaacggaagtcatgagcggccagcaggcggcggcagaagtggcggcgctcgacgaggttgagcaggtgatggcggcgattgtcggcgcagcaggcctggtgccgacgctctcagccattcgtgcgggtaaaacggtgctgctggcgaacaaagagtcgctggtgacctgcggccgtctgtttatggatgccgtgcagcagtacggcgcacgattgttgccggttgatagcgagcataatgcgatttttcagagtatgccggaaacaattcaacataatctgggatacgctgatttaacccagaacggcgtggcgtcgattctgctcactggctccggcggtcccttccgggaaacggcgatttctgaactggcggcgatgacccccgatcgggcatgcaagcatccaaactggtcgatggggcgcaaaatatctgtcgattcggccaccatgatgaacaaagggctggagtatatcgaagcccgctggctgttcaacgcctcggcgcagcagatggaagtcctgatccatccgcaatcggtgattcactcgatggtacgttatcaggatggcagcgtcctggcgcagctcggcgagccggatatgcgtacgccgattgcccacacgatgggctggccaaaacgccttaattctggcgtgaaaccgctggatttctgtcagttgagcactctgagcttctcggcgccggattacggccgttacccctgcctgaagctggccatggaggcttttgatgtcggtcaggcggcgaccacggcgctgaatgcggcaaatgaagtttcagtcgcggcgtttctgaacggggatattcgctttaccgatattgcggcgataaatcaggcggtgctggatcaacaggcgttaaatgagccgcaaagtattgatgaagtgctggctattgatgcgatggcccgggtaagcgcaggccagctcctgacggcgtggcgcaaattctgatacgcgttgtgatatttgtgggcgctgtgcttcagtgatatagtctgcgccatccgatcgttgcattttggtgtgaaagattacggtggccgtggcaagacacggcttttttgcgtaaagcttttggttgttctctgcgattggccgtagctccggcaccggataaaaatgcgtatccagcgctgaccggtggcccgtgtttagtagcttagctaatccttattatggacttaaaacgcgttatgttgtctgctaatcaaactgtcagcgaaatgttgcctgcgcatggctgtcgtcatgtggccattattatggatggcaacgggcgttgggcaaaacggcaaggaaagatccgcgcctttggccataaagccggcgctaaatctgttcgtcgcgccgtctctttcgcggcgaataatggtattgaagcgttgacgttatacgcgttcagcagtgaaaactggaatcgcccggcgcaggaagtcagcgcgctgatggagctgtttgtctgggcgctggatagcgaagtgaaaagtctgcaccggcataatgtgcgcctgcgtattatcggcgagaccacgcgcttcaatgcgcgtctccaggagcgtattcgtaaagcggaggcgctgactgagaacaacaccggtttgaccctgaatattgcggcgaactacggcggccgctgggatatcgtccagggcgttcgtcatctggccaaacaggtgcaagacggggtgcttcagcccgagcaaatcacagaagagatgctgagccagcaggtctgcatgcatgaactggctcccgtagatttagttattaggaccgggggagagcatcgcattagtaattttttgatttggcaaattgcctatgccgaactttactttacggatgttctttggcccgatttcgctgaacaggactttgaaggtgcactccatgcctttgttaatcgagagcgtcgcttcggcggcactgagccgggcggcaacaatgcctgatgggggtcacttttgctgaagtatcgcctgatttctgctttcgtcttaatacccgttgttattgcggcgctttttttactgccgcccgcgggttttgccatcgttacgctagtcgtctgtatgctcgccgcgtgggagtgggggcaatttagcggtttcacttcaactacccagagagtctggctgtcagtgctttgcggtttgctgctggcgctgatgctattcctgatgccggaataccattatgacgttcatcaaccgctggttgagggcgcgctatgggcgtcattaggctggtgggtcgtcgcgctgcttttagtgctgacttaccccgcttcagcggctttctggcgcaattcaaaaacgctccgtctgatttttggcgtcctgaccatcgtgccgtttttttggggcatgctggcgcttcgggcctggcattatactgatgaccattatagcggtgcgctgtggttgctgtacgtaatgattctggtctggggcgcggattccggcgcttacatgttcggaaaaatgttcggtaagcataagctggcgccgaaggtttctccgggtaaaacctggcagggttttttcggcggtctgttaacggcagcggttatctcctgggcttacggctggtgggcccatctgaatgttacgccgatggtgctgctggtgtgttctattgtcgcggccctggcttcggtactcggcgacctgaccgaaagcatgtttaaacgcgaagctggcattaaagatagcggaaatctgattcccggacacggcggtatcctcgatcgtatcgatagcctgacggccgcggtgcccgtgtttgcttgcctactcttgttggttttcaggacgatttgacggaaggttttatgctgagcgttctctggaatttggctgcttttattattgcgctgggcgtgttgatcaccgtccatgagtttggccatttctgggttgctcgccgctgcggtatccgcgttgagcgtttctcaatcggctttggcaaagcgctgtggcgccgttttgacaagcaaggaacggaatttattatcgcccttattccgctgggcggttatgtcaaaatgctcgacgaacgcgttgagcccgtggcgccagagatgcgtcactccgcgtttaacaacaaaaccgtcggccagcgcgccgccgttattgccgcggggccaatcgcgaacttcctttttgccatttttgcctactggctggtgtttattatcggcgtgccaggcgtgcgtccggtcgttggcgacataacgcccaactcgatcgccgcgcaagcacaaattgcaaaaggaacggaacttaaagcgatagatggcatcgaaacgcctgattgggatgcagtacgtatggcgctggtggcgaagataggcgatcggcaaacaatagttacggtcgcccctttcgggaccaatcaacgtcaggataaaatcctcgatctgcagcactgggcgtttgagccggataaacaagatccggttgcctcgttgggcattcagcctcgcagcgcgcagattgataccgtcctggctgaagtacaatctgactcggcggcgcagaaggcgggtttgcaagcgggcgacaggatcgttaaagtcgatggtcaaccgttaacgcagtggatgacgtttgttaatctggtgcgtgataatccgggtagggcattagttctggacatcgagcggcagggtagccccctgtcggtgaccttgacgccggatacgaagtctaccaaaggcaaagcggaggggtttgcaggggtcgtacctaaggtcatcccgctgcctgatgaatataagacagtgcgtcagtacgggccatttgccgccatcgctgaagccacggataaaacctggcagctgatgtcgttaacggtccgaatgctgggcaaattgataaccggtgatgtcaaactgaacaacctcagcgggccgatttctatcgcccagggggctgggatgtcagcggaatttgggttgatttactatctgatgttccttgcgctgatcagcgtgaacctcggcataatcaacctgttcccgcttcccgttctcgacgggggacatctgctgtttttggcgattgaaaagctgaaaggcgggccggtatccgagcgagttcaagactttagttatcgcattggctcaatattgctggtgctgttaatggggcttgcacttttcaatgatttctctcggttgtaagagagtttgttaggaagaacgcataataacgatggcgatgaaaaagttgctcatagcgtcgctgctgtttagcagcgcaaccgtatacggtgctgacgggttcgtggtgaaggacattcatttcgaaggccttcagcgagtcgctgttggtgcggccctcctcagtatgccagtgcgtcctggcgataccgtaaccgatgatgatatcagtaacaccatccgtgctctgtttgccaccggcaactttgaggacgtccgcgtactgcgcgatggtgataccctgctggtgcaggtgaaagagcgtccaacgattgccagcatcactttctccggtaacaagtcggtgaaagatgacatgctcaagcaaaaccttgaggcatccggcgtgcgcgtaggggaatccctcgatcgcaccacgctggctgatatcgaaaaggggctggaggatttctactacagcgtcggtaagtacagcgccagcgttaaagctgtcgtgacgccgctgccgcgtaaccgtgtcgacctgaagctggtattccaggaaggcgtctcggcgaaaatccagcagatcaatatcgtcggtaaccacgcattcagcaccgatgaactcatttctaccttccagctgcgcgatgaagtgccgtggtggaacgtggttggcgatcgtaaatatcagaaacagaagctggcgggagatcttgaaacgctgcgcagctactatctggatcgcggctatgctcgtttcaacattgactccacgcaggttagcctgacgccggacaaaaaaggtatctacatcaccatcaacattaccgaaggcgatcagtacaagctttctggtgtgcaggtgacgggtgacctggcggggcattcggcagaaatcgaagcgctgaccaaagtggagccgggcgagctgtataacggcaccaaagtgaccaaaatggagaatgacattaagaaactccttggtcgctacggctatgcctatccgcgcgttcagtcccagccggaaatcagcgatagcgataagaccgtgaagctgcacgtgaacgtcgatgcgggtaaccgctactacgtgcgtaaaattcgcttcgaaggcaacgacacctcgaaagatgccgttctgcgtcgcgaaatgcgtcagatggaaggcgcctggctgggcagcgacctggtcgatcagggtaaagatcgtctgaaccgtttaggctactttgaaacggttgataccgatacgcagcgcgttccgggcagcccggatcaggttgacgtggtctataaggttaaagagcgtaacaccggtagctttaacttcggcgttggttacggtacggaaagcggcgtcagcttccaggccggcgttcagcaggataactggctcggtaccggctattccgttgggattaacggcaccaaaaacgactatcagacctatactgaactgtcggtgacgaacccgtactttaccgtggatggcgtcagcctcggcggtcgtgttttctataacgacttcgacgctaacgatgcggacctgtctgactataccaacaaaagctatggtacagacatcacgctgggcttcccggttaacgaatacaatacgctgcgcgcgggcctgggctatgtgcataacaagctatccaacatgcagcctcaggtatccatgtggcgttatctgaattcgatggggcagtatccggacaacaccaacgacagaaactcgttcagcgctgacgacttcaccttcaactacggctggacgtataacaagctcgaccgtggcttcttcccgaccgaaggctcacgcgtcaacctgaacggtaaagtgacgattccgggatcggataacgaatactacaaagcgacgctcgataccgcgacctatgtaccgatcgatgacgatcataaatgggtgatgttgggtcgtacccgctttggttatggcgatggtctgggcggtaaagagatgccgttctatgagaacttctatgccggtggttcaagcaccgtgcgtggcttccagtccaatactatcggtccgaaagcggtttatttcccggccagcagccgtcatgacgacgacagcagctacgataacgaatgtaagagcagcgagtccgcaccgtgtaagtctgatgatgcggtgggcggtaacgccatggcggttgccagccttgagctgatcaccccgacgccgtttattagcgataaatatgcgaactcggtccgtacttccgtcttctgggatatgggtaccgtgtgggatactcactgggattcagccgcatatgggggttacccggactacagcgatccaagcaatatccgtatgtctgcgggtatcgcagtacagtggatgtcgccgttagggccgttggtattctcctacgctcagccgtttaaaaagtacgatggagacaaagccgaacagttccagtttaacatcggtaaaacctggtaatggtattggctacaatggaatgtaagtgcagttgcagtatagcgctgactattggcgataactgaggttgtcgcctggccacgcaaataacggtacccctgggtactcatgggatggtaaggagttaattgtgaaaaagtggttattagctgcaggtctgggtttagcaatggtaacttccgctcaggcggcagataaaattgcaatggttaacatgaacagcctcttccaacaggttgcccagaaaacaggcgtttctaacacgctggaaaacgagtttaaaggccgcgcgagcgagctgcagcgtatggaaggcgacctgcagtctaaaatgcagcgtctgcagtccatgaaagcgggctctgaccgtaccaaactggaaaaagacgtgatggctcagcgccagactttctcccagaaagcgcagtctttcgaacaggatcgtgcacgtcgttctaacgaagagcgcggcaagctggtgactcgtattcagagcgctgtgcagagcgtggctaaagatcagagcatcgatctggttgttgactctaatgccgttgcatacaacagcagcgatgtaaaagacatcaccgctgatgtgctgaaacaggttaaataagtaatgccttcaattcgactggctgatttagcccagcagttggatgcagaattacacggtgatggcgatatcgtcatcaccggcgttgcgtccatgcagtccgcacaagcgggcgatattactttcatggtaaatcctaagtaccgtgaacacctggccgcttgccaggcatctgccgtcgtgatgacgcaggatgatttaccttttgctcatagcgccgcgctggtagtgcgtaatccctacctgacctacgcgcgcatggctcaaattcttgataccacgccgcagccggcgcaggatatcgcgcccagtgcggtcatcgatgcgacggcgaagctgggtgcccacgtggcgattggcccaaacgccgtgattgaatcgggcgtcatcctcggtgataacgtggttatcggcgcgggctgcttcgttgggaaaaatacgaaaataggtgccggctcgcgtttatgggccaacgtcaccgtttaccacgacattgagatcggcgagaattgcctgatccagtccagcacggtgattggcgcagatggcttcggctacgcgaacgatcgcggcaactgggttaagatcccacagcttggtcgcgtgattattggcgatcgcgtggagattggcgcctgtacgaccattgaccgtggtgcgctggacgacaccgtcatcggtaacggcgtgattattgataaccagtgtcaaatcgcgcacaacgtggtgattggcgacaacaccgcggttgctggcggcgtcatcatggcgggcagcctgaagatcggccgctactgcatgattggcggagccagcgtgatcaacggccatatggaaatctgcgataaagtcaccgtcacggggatgggaatggttatgcgtcctatcaccgagccaggggtttactcttcaggtatcccgctgcagccgaataaggtctggcgtaagaccgctgcgctggtactgaatattgatgatatgagcaagcgcctcaaagccattgagcgcaaggttaatcaacaagattagtgctgcgtccagccacattaaattttcggcctgttgcattcatgagattgccgcaggccgtgttattattgccttttaggatatttagacaggaagagtattttgactactgacactcatactctgcacattgaagagattctggaacttctgcctcaccgatacccgttcctgctggtcgatcgcgtgctggattttgaagaaggtcgttttctacgcgcagttaaaaatgtttctgtaaatgagccgtttttccaggggcatttccctggtaagccgattttaccgggcgtattgattctcgaagctatggcccaggccaccggcattctggcattcaaaagcgttggaaaactggaaccgggcgagctgtattattttgccgggattgacgaagcgcgtttcaaacgtccggtcgtgcctggcgatcagatgattatggaagtcacttttgaaaaaacccgccgcggtctgactcgctttaaaggcgttgcaaccgttgacggaaaagtggtttgcgaagcaacgatgatgtgtgcccgtagccgggaggcctgatacgtgattgataaaaccgcctttattcatccttccgccattgtagaagaaggcgccgttattggcgctaacgtccacgttggcccgttttgtattgttggtgctaacgtcgaaatcggcgaaggtaccgtactgaaatctcacgttgtcatcaacggccataccaaaattggccgcgataacgagatctatcagttcgcttccatcggcgaagttaaccaggacctgaaatatgctggcgaaccgacccgcgtggaaattggcgatcgcaaccgcatccgcgaaagcgtcaccattcatcgtggcacagtacagggcggtggattaacgaaggtgggcagcgataacctgctgatgatcaacgcccacgtggcgcacgattgtacgctgggcgaccgctgtattctggccaataacgcgacccttgcgggccacgtttcgctggatgattttgttatcatcggcggcatgaccgccgtgcatcagttctgcattattggcgcacacgtgatggtgggcggctgctccggcgtagcgcaggacgttccgccgttcgtgattgcgcagggcaaccacgcgacgccgtttggcgtcaacatcgaagggttgaaacgtcgcggcttcagccgtgaggcgatcactgcgattcgtaacgcgtataagctgctgtaccgcagcggtaaaacgctggacgaagcgaaagctgaaattgccgagctggcggcgcagtatcccgaagtgcagacctttaccgacttttttgcccgctccacgcgcggcctgattcgttaatggctgaattgcgtcccctgacgattgccctggtcgccggagaaacctccggcgatattcttggtgccggtcttatccgcgcgctcaaagcccgcatacctgatgcccgctttgtcggcgttgccgggccgttgatgcaggcggaaggctgcgaagcctggtatgagatggaagagctggcggtgatgggcattgtggaagtgctgggtcgcctgcgccgtctgctgcatattcgcgccgatctcacccgtcgattgaccgagcttaagccagacgtattcgtcggcattgatgcgcctgacttcaatattaccctcgaaggtaatctgaagaagcagggtatcaaaaccatccattacgtcagcccctcggtgtgggcatggcggcaaaaacgcgttttcaaaattggcagatccaccgatctggtactggcatttctgcctttcgaaaaagcgttttatgacaaattcaacgttccctgccggtttatcggccacacgatggcggatgcgatgccgctggacccggataaaggcgcggcgcgcgaccgtctggggatcgatcgtaacgtgcattgcctggcgctgctgccgggaagccgcggggcggaagttgagatgctcagcgctgattttctgaaaacggcgcagctcctgcgagaccattatcccgacctggaagtggttgttccgctggtcaacgcgaaacggcgggaacagttcgagcgcatcaaagcggaaacggcgccggatcttgccgtccacctgctcgacggccgggcgcgcgatgcgatgatcgccagcgatgccgcgctgctggcctccggcacggctgcgctggagtgtatgctggctaagtgtccgatggttgtcggctatcggatgaagccgtttaccttctggctggcgaaacggctggtgaagaccgactatgtgtcgttgccgaatttactggccgggcgcgaactggttaaagaactgctgcaggatgaatgccggccgcaggtgctggccgaggcgctgaagccgctgctggccgacggaaaaaccagccacgatatgcatgaaaccttccgcgcgctgcatcagcagatccgctgcaacgctgatgagcaggcggcggatgccgtactggagttagcaaaatgatggaattcgtatatccgcatacccatctggttgcgggagtcgatgaagtcggacgcggcccgctggttggcgcggtggtgaccgccgcggttattctcgatccggcaaagccgatcgtcggtcttaacgactcaaaaaagctaagcgaaaaacgccgccttgcgctatttgacgagatcaaagaaaaagcgctgtgctggagcctcggtcgcgctgagccgcatgaaatcgatgagctgaatattttgcacgcgaccatgctggccatgcagcgcgccgttgccggtttgcgcgtttcccctgagtttgttcttattgatggtaaccgctgtccgccgctgccgatgccgtcactggcggtcgtcaaaggcgacagccgagtggcggaaatcagcgccgcgtctattctggctaaagtgacgcgcgatgctgaaatggccgtactggaccgggagttcccgcagtacggctttgcgcaacataaaggttatcccaccgcttttcatctgcaaaagctgctggaacatggcgtaatcgagcaataccggcgcagctttggcccggtgaaacgcgcgctgggcctggcgtcctgaactgacacgcaagcaattaagtaacgcggaatctgaagatggctgaaccacgtttcgtacacctgcgggtgcacagcgactattccatgatcgatggtctggcgaaaaccggaccgttggtaaaaaaggcggccgcgctcggcatgcctgcgctggcgatcactgattttaccaacctctgcgggctggtgaagttctacggagcagggcacggtgccggaattaaacccatcgtcggggccgatttccacgttcagagcgatctgcttggcgatgaactgagccagctgacggtactggcggcgaacaacgctggctatcaaaacctgacgctgctgatctccaaagcctatcagcgcggctacggcgcggcaggcccgattatcgatcgcgactggctgatcgaattaaaagaagggctgattttgctctccggcgggcgtatgggcgacgtgggtcgtagcctgctgcgcggaaacatggcgctggtggatcagtgcgttgatttttatgaacaacatttccctgattgctacttccttgagctcattcgcaccggccgtcaggatgaagagccctacctgcatgcagcggtagaactggcggaaacccgcggcctaccggtggtggcgaccaacgatgttcgcttccttgagccgggcgacttcgacgcccatgaaatccgcgtggctatccacgacggctttaccctcgacgatcccaagcgtccgcgcaactactcgccgcagcagtatatgcgcagcgaagaggagatgtgcgagctcttttccgatattcccgaagcgctgcaaaacaccgtggagatcgccaaacgctgtaacgtgaccgtgcgccttggcgagtacttcctgccgcagttcccgacgggggatatgaccaccgaagattatctggttaagaaatccaaagagggtctggaagagcgtctggaattcctgttccccgatccggatgagcgggctaaacgccgtcctgaatatgatgaacgcctggatattgagctgcaggtgattaaccagatggggttcccgggctacttcctgatcgttatggagtttatccagtggtcgaaggataacggcgtgccggtagggccgggacgtggttccggcgccggatcgctggtggcctatgcgctgaaaattaccgacctcgatccgctggagttcgacctgctgttcgaacgtttccttaacccggaacgtgtctccatgcccgacttcgacgttgacttctgtatggagaagcgcgaccaggtgattgaacacgtcgcggacatgtacggtcgcgatgcggtctcgcagattattaccttcggcaccatggcggcgaaagcggttatccgcgacgttggccgcgtgctgggccacccgtacggctttgtggaccgcatttccaagctggtaccgcccgatccgggtatgacgctggcgaaagcgtttgaagccgagccgcagctgccggagatttacgaggcggacgaagaggttaaagcgctgatcgacatggcgcgtaagctcgaaggggttacccgtaacgccggtaaacatgcgggcggggtggtgattgcgcccaccaaaataaccgattttgccccgctgtactgcgatgaagcgggccagcatccggttacccagtttgataagaacgacgttgaatatgccgggctggtgaagttcgacttcctcggtctgcgtacgctcaccatcattaactgggcgctggagatgatcaacgcccgccgcgagaagaacggcgaggggccgctggatatcgccgctatcccgctggacgataaaaaaagcttcgacatgctgcagcgttcggaaaccaccgccgtcttccagcttgaatcgcgcggtatgaaggatctgatcaagcgtctgcagcctgactgctttgaagatatgatcgctctggtggccctgttccgaccggggccgctgcagtcgggaatggtggataactttattgaccgtaagcacggtcgcgaagagatatcgtatccggacgtacagtggcagcacgaatgcctgaaaccggtactggagccaacctatggcattatcctgtaccaggaacaggtcatgcagattgcccaggagctttccggctataccctcggcggcgcggatatgctgcgtcgtgcgatgggtaagaaaaagccggaagagatggccaagcagcgcggcacctttgaagaaggggcgagaaagcgcggcgttgacggcgaactggcaattaaaatctttgatctggtagagaagttcgccggttatggatttaacaaatcgcactctgccgcttatgctttagtgtcctatcagacgctgtggctgaaggcgcactatccggctgaatttatggcggcggtaatgaccgctgatatggataacaccgagaaggtcgtcggcctggtggatgagtgctggcggatggggctgaaaatcctgccgccggatattaactccggcctgtaccattttcacgttaacgacgatggcgaaatcgtttatggtatcggcgccatcaaaggcgtcggcgaaggtccgatagaagcgatcattgaagcccgtaatcagggcggctatttccgcgaactgttcgatctctgcgcgcgtacggatattaaaaagctcaaccgccgggtgctggaaaaactgattatgtccggggccttcgaccgcctcgggccgcatcgcgcggcgttaatgaattcactgggcgatgcgctaaaagccgccgatcagcacgccaaagccgaagctatcggtcaggcggacatgttcggcgtactggcggaagagccggagcaaatcgaacagtcctacgccagctgccagccgtggccggaacaggtcgtgctggatggcgaaagggagaccctggggctgtatctgaccgggcatccgattaaccagtacttgaaagagatcgagcgctacgtaggcggcgtacgactcaaagacatgcatccgaccgatcgtggtaaagtgaccacggcggccgggctcgttattgccgcgcgggtcatggtcaccaagcgcggcaatcgtatcggcatctgcacgctggatgaccgttccgggcgtctggaggtgatgttgttcaccgacgccctggataaataccagcagctgctggaaaaagaccgcatacttatcgtcagcggacaggtcagctttgatgacttcagcggggggcttaaaatgaccgctcgtgaagtcatggacattgacgaagcccgggaaaaatatgctcgcgggcttgctatctcgctgacggacaggcaaattgatgaccagcttttaaaccgactccgtcagtctctggaaccccaccgttcgggaactattccagtacacctctattatcagagggcggatgcacgcgcgcggttgcgttttggcgcaacatggcgcgtctctccgagcgatcgtttacttaacgatctgcgtggccttatcggctcggagcaggtggaactggagtttgactaatacaggaatactatgagtctgaatttccttgattttgaacagccgattgcagagctggaagcgaaaatcgattctctgactgcggttagccgccaggatgagaaactggatattaatatcgatgaagaagtgcatcgcctgcgtgaaaagagcgtagagctgacgcgcaagatcttcgccgatcttggtgcatggcaggttgcgcagctggcgcgccatccacgtcgcccgtacaccctggattatgtccgcctggctttcgacgaattcgacgaactggccggtgaccgtgcctatgctgacgataaagctatcgtcggcgggattgcgcgtctggacgggcgtccggtaatgattatcggccaccagaaagggcgcgaaaccaaagagaaaattcgccgcaacttcggtatgccggcgccggaaggctatcgtaaggcgctgcgcctgatggaaatggccgaacgctttaaaatgccgatcatcaccttcatcgataccccgggcgcctacccgggcgtcggtgcggaagagcgcggccagtctgaagcgattgcccgcaacctgcgtgaaatgtcgcgtctgagcgtcccggttatctgcaccgttatcggtgaaggtggttccggcggcgcgctggcaatcggcgtgggcgataaagtgaatatgctgcagtacagcacctattccgttatctccccggaaggctgtgcctccattttgtggaaaagcgccgataaagcgccgctggccgccgaagcgatggggattgttgccccgcgtctgaaagagctgaagctgattgactccatcattcctgagccgctgggcggcgcgcatcgtaatccggaagtcatggccgcctctctgaaagcgcagctgctggccgatctggctgacctcgatgttctgagcgaagaagatctgctgaaccgtcgctatcagcgtctgatgagctacggctacgcctgattatctcactcattttttatccctgagggccggattttccggccctttttttatgtgttgtttactgagacgagatgagatgaataagagctaatgtgattagccgatgatgccgatctcccctaaaactgcagcaactgccagggattgcgacccggcaggccgttaacaaggataaaggagaaatactatggcattgcacaaaaccgtcgcattaagcgccgtggccgcagggatcatgttaagcctgggggccgcacaggccacaccgttgcttggcgcaacggaagcgacaaccatcaaggcgagtgacctggccgcgaaagaaaaagccttaaccgactttccgctcatgacatcggtaaaatcatcgattcaaacgctgccgaacagcgaagttgaaaaaatcgagccgggtctggcgaccaacccggcaaacgtgaagcgcgtggaaagcattctgtccgaaaaggattgggaatatctattcccgatgcgcgcggcagaatatacctactctaactttctgaaagctattggtaaattccctgcagtttgcgggacctataccgacggacgcgatagcgatgccatatgccgtaaatctctggcaaccatgtttgcccactttgctcaggaaaccggtggccacgaaagctggcgcgatattcccgagtggcgccaggcgctggtttatctccgtgaagtgggctgggttgagggtcagaaaggcggctacaacggggagtgtaacccggatatctggcaggggcagacctggccctgcggtaaagataaagacggcgactacctgagctactttggccgcggcgcaaaacagctctcctataactacaactacggtccgttctccgatgctatgtacgatggcgacgttcgtcctctgctggataaaccggagcgggtggcggatacctggatgaacctggcgagcgcggtgttcttcttcgtttacccgcagccgccgaagccctctatgctgcacgtcatcgacggaacctgggtaccaaacgatcatgataaagcgaatggcctggttgaaggctttggggtcaccattcaaattatcaacggcggcgtcgagtgcggcggggcggaagagaacgcgcagtctctgaaccgtattgcctactacaaagagttcgcaaactacctgaaagtgccgattgctgatgatgaagttctcggttgtaagaatatgaagcagttcgatgaaggcggcgcgggcgcgttaccgatttactgggaagaggattggggatggagcccggacaccgctgatggcaagactaacgcctgccagctggtgggctaccagacgccgtatagcgcctttaaacaaggtgactatgcgaagtgcgtccagagccacttcaacgtcaatatcatcgacgacaccggccaggccgaggataccaccccggccacgcctgacgataccacgcctgcgcaggaaactaacgtggcgccggttgcgcgtatcgccggtccgattggcgctatcgaagcgggcgccagggtttccttgagcgcggagggctctaccgatgcgaatggcgataagctcacctatacctggatgtcgcaggacggtcagactatcagcggacaggataaagccgttatcacctttaccgctccggaaaaagatcgcgatgcgcaatatgtggtgagcctgacggtaagcgacgggaccttgtccagcacggcaacgtacaccctgaacgtgaaggctaaagctgctgctgcggatgaaacgaccgatggcaaagacagcgacaccatcagctatccttcctggagcagtacccagacctggaaagcgggcgatatcgttaataaccacggcgcgctgtatcagtgtaaaccgctacctgaaggggcgtggtgcaacgtggcgccgacctactatgagcccggcgcaggcattgcctggggcgatgcgtggaaagcgctgtaatagagataaatccgccagtgcttagcgctggcggggtgatatgatgctttccttaggtaaattcaggaggaaagcgtgaatatcattgcgatcatgggtccccacggcgtctattataaagacgaaccgatcaaagaactggaagccgccctgcaacggcaaggtttccagaccatctggccgcaaaatagcgccgatcttttgcaatttatcgagcataatccgcggatctgcggggttatttttgactgggatgaatacagcgttgatctgtgcagcgatatcaatcgcttaaatgaatatctgccgctgtacgcatttatcaacgcccattcgacgatggacgtcagcagccaggacctgcgcatgacgctatggttctttgaatacgcgctggggctggcggaagagattgctacccgcataggtcaatacacccgcgaatacctcgacaacataaccccgccgtttaccaaagccttgttcaactatgtgcaggaggggaaatatactttctgtacccccgggcatatgggcggctcggcatatcaaaaaagtccggtgggctgtctgttttatgatttctttggcgggaataccctaaaggccgacgtctctatttccgtgacggagctgggatccctgctcgatcatagcggtccgcatctggaggcggaagagtatattgcccgcgcattcggcgccgaacagagctatatggtgaccaacggaacctcgacgtcgaataagattgtcggtatgtattccgctccggcgggcagcaccctgcttatcgatcgcaactgccataaatcgttggctcatttactgatgatgagcgacgtggtgccgctgtggctaaagccgacgcgcaatgcgctagggatcctcggcggcatacccaagcgcgaatttacccgcgacagtattcagcaaaaggttaatgcgacaggcggcgccgggtggcctgtgcatgcggtgatcaccaactccacctatgacggactgctgtataacaccacctggatcaaagagaccctcgacgtaccgtcaatccactttgattccgcctgggtgccctatacccattttcatccgatctatcagggtaaaagcgggatgagcggcgatcgcattgcggggaaagtgatctttgaaacgcagtcgacgcataaaatgctggccgcgctatcgcaggcttcgctgattcatattaaaggcagctatgatgaagataccttcaatgaagcctttatgatgcacacctcgacctccccgagctacccgatcgttgcctccattgagacggctgccgccatgctgcgcggcaactccggcagacgactgattcagcgttcgattgagcgggcgctggattttcgtaaagaggtgcagcggttgcgcgaagagtctgacggctggttttttgatatctggcagccggaagaggtgggggaagcgcagtgctggccggtttcacccggagaaaggtggcatggctttcaggacgccgatgacgaccatatgttcctcgatccggtgaaagtcaccattctgacgcccggtatggacgagcagggcaacatggatagcgaaggcattccggccgcgctggtggcgaagttccttgatgagcgcggcgtggtggtagaaaaaaccgggccgtacaacctgctgttcctgttcagtatcggtatagataaaacccgtgcgatggggctgctgcgcggattgaccgagttcaaacgcgcttacgatctcaatttacgggtgaaaaacatgctgccggatctgtacgccgaagatccggatttttaccgcaacatgcgtattcaggatctggcccagggtattcatcgtctgattcgccagcaccagctctcgcagctgatgcttagcgctttcgacgtcctgccggagatgaaaatgacgccgcatcaggcctggcagcggcagattaaaggcgaagtggaaaccattgaactggagaatctggtcgggcgtatttcagcgaatatgatcctaccgtacccgcccggcgtgccgctgctgatgcccggcgagatgatcgccgaggagagccgcgcggtgctcaattttctgcttatgctgtgctccatcggccgccactatccgggtttcgaaaccgatatccacggcgcgaaacgcgatgaagacggcgtgtactgggttcgagtcttaaaaaatgactaagcgcttgcgcactcacgaactgaacgagtaacgttgttggcttcaactggaggagttgtaccatgctgggtttaaaacgggttcaccatatcgccatcattgcgacggattatgcgaagagtaaagccttctactgcgacattctggggttcaccctgcagggcgagttctatcgccaggagcgtgattcatggaagggcgatctggcgctgaatggcgaatatgtcattgaactcttttcattcccgtttcctcctgcgcgtccgagccgtcccgaagcctgcgggctgcgccatctggcgtttagcgttgatgatgtcgatgccgccgttgcgcatcttgaggcccacggcgtggcctgtgaagacgttcgtatcgaccccttcaccggtaaacgattcaccttttttaacgatcccgacgggctaccgctggagatttatcagcagtaattcttgtcagggcgtgttctgccgggtaacgtgccggacacgctttcctcagttagtactctcatgatgatgatcccagacatggcgcaaacgctacagccgcaccgccattttttagtggcctttagcggcgggctggattcgagcgtgctcctgtatcgcctggtttgctggcgcgaacaggatcctaccgttcagctgcgggcgatgcatattcaccacggcctcagcgcgaacgccgacgattgggtggcgcactgccgacaaatatgccagcagtggcaggtaccgcttttggttgaacgggtggcgctcgccgatgaggggctggggattgaggcccacgcgcgtcaggcgcgctatcaggctttccgttcggcgctattacccggcgaagtgctggtgacggcacagcatcttgacgaccagtgtgaaacctttctgttggcgcttaagcgggggagcggcccaaccgggctttcggcgatggccggcgagtccgattttgccgggacgaaactgctgcgtccgctgcttaacgaaagccgcgactccctgcaccggtgggcgatagcccatcagctcagctggattgaagacgaaagtaaccaggacgacgcctacgatcgcaattttctccgcctgcgaattgttccgctgcttaacgctcgctggccgcacttcgccgaggccgtagcgcgcagcgccagcctgtgcggcgagcaggaacagctgctggatgaaatgctcgcggcggagctggcaacgctggtggcggaggatggcgcgttgactatcgaaccgttggcggccatgagtgcccctcgtcgggccgcgctgctgcgccgctggctggctgggctcaatgcgccgatgccttcgcgcgagatgccggagcgtatctggcgtgaagtggcgatggcgcgcgaggatgcgtatccctgtctgcgccttggccaattcgccgttcgtcgctatcagcaacggctgcactgggtgaaatatctccccggacagagcgagacggtgctggcgtggcgcgatattgccaggccgctgccgttacccgacggccttggcgaactgaagctcctggccggcggcccgttacgcggcccgcgccaggatgaagcggtcactattcgttttcgcgccagcggtaatctgcatatcgtcggccgccagggcggccgcaagctgaagaaaatctggcaggaactcaacgttgcgccctggcggcgcgataccacgccgctgctgttttacggcgaaacgcttatcgccgcagccgatggtctgtttattaccgtcgatgggaaagttcaggaaggtgaaggcgtgcagatgatgtggatgaaaacgggcggctgagccacccgttttgcttcaggactcgctaaccactaccgtaccgatttccggatggctgaagctggcgattttatccaggcgcagttcgcggacgtcaccggcgagctccacgacgagatactcgatatttttgcgcgagataagatcgttggccttcgcttgcagctgttcgccatctttgagctccagcgccaggaccagatggtgctgacaggcaagttcgaggttgtcataatcatcgcaattgatgggttgataagtatcattcattgacataatcgctcaccagtaagtttgccgccgcatatgcggccttttccctgactgactcagcaagggcctgatccgccgcaacctcattcaatactttcaacacgcaacctagcgcatccgggatatacccaaggtccccgctggctatttccgcataccgcttgcgtattaactcacaatatttgtccacatgccctcctgtcagcgttctgacttaaccgtgggatgtaagtttaagcctacgaagataaactctgtttagcaaggtgactataccatagtcatttaagcaatatcagcaggatgaaaggggatcctgcgattgctgacagccttttgccaccagtttcgctacaatgaacgccatttttatcaggagtttcctcatggcgctgaaagcgacgatttataaagcgacggtgaacgtggccgacctggaccgcaaccagtttctggatgccagtttgacgcttgcccagcatccgtcagaaacccaggagcgcatgatgctgcgcctgctggcgtggatgaaatacgccgacgagcgtctgcagtttacccgcggtttgtcttccgatgatgaagctgaactctggctgctaaacgatcatctgggcgttgatctgtggatcgaactggggctgccggacgaacggcggattaaaaaagcctgttcgcgggcgcaagaggtggcgctgtttgcctataatagccgggcggcagaaatctggtggcagcaaaataaaagcaaattggcacagttttcaaagctaaccgtatggtatttagatgatactcagctggcgcagctcagtgcttttgccgatcggacaatgtcgctacaggcgactatccaggatggcgctatctggttatctgacgctaagaataatctggaaattcatttaacggcctggcaaacatccgcatgattacgattagccgcagcgtggcgattgcggatgacgaggtctcactttccgggatacgcgcccagggggcgggcggtcagcatgtcaataaagcatcgacggctatccatttgcgctttgatattaaggcatcgagcctgcctgagtattataaggaacgtctgcttacctccagccatcacttaatttctgccgagggtgtggttatcattaaggctcaggaatatcgcagccaggagatgaatcgcgaagcggcgattgcgcgtctggttgccttaatacaagaattaaccgcagtgcagaagcgccgccgggagacgcggccgaccagagcgtcaaaagagcgccggcttgcctcaaaggcgcaaaaatcctcagttaaggcgctgcgtgggaaagttcgtcattaaaggcatggcgaaccggtggaatggataataaggaatttacagtgaagaaaatcgtattttcagtcgtggctgcatgctcgctttttgccctattcggctgtaaccatcgcgcggagatggacacgctacaaccggcgccgatggaagagctaaagccgatgcagcagagctggcgcggcgtgctgccgtgtgccgactgcgaaggtatcgaaacttcgctctttcttgagaaagacggcacctgggtgatgaacgagcggtatcagggcgtcagtcgcgagccttcctcctttgcttcctatggcacctgggcgcgcacggccgataagctggtgctgaccgacagcaaaggcgagaagtcttactatcgggcgaagggcgacaagctggaaatgctcgatcgcgacggtaatcccatcgagtctacgctgaactatacgcttgagtcagtcaaatccagcctgcccatcacgccaatggcgatgcgcggaatgtacttctatatggcggatgccgcgacctttaccgattgcgcaaccggcaagcgagtggcagtcgcgaataacgcgcagctcgagcgtgattatgccgcggcgcgcggaacggatactcgcccggtgctgctggtggttgaggggcactttacgctggaagcgaacccggattcgggagcgccggttaaagttctggcggtggattcaccaggcaagttttatcaaaaagaagactgtaattctcgttagttaattgagtcctacgagacggcttgtcttgatataaattcccaatttaagatgcccgatatactgcaattgtgtttcgggcttaaagtttgccacgtccccctcacgcatatgaagcaggtctgatgggctaatccagcccggttgagccagggtcagcgggtgtccggccttcgcgaaggcatcgctgacaaactcagaacaaaaccacatttttttgtccccggaaacggcatcgctaagctgcgctttggccaggccattcacgcactgctggcggaaatccttcgaaaagggattcagggagcagagctgtttggttaccataaagggcacaaattcaatgatgccgcgatagttatagccgctgtttctgtttttataggcgaaatttttaatgccggcggcttgttgcggcgtaaggtcaggcgctcttagggcaaacagcttatcgctgtgctgcatcgcttgctggagcggaataatctgcaccccagcgccggttgcctctgcaacctggttatcaccgatatagatagcgacatggccaacggaggatgcgctaaaagcacgaatccccagggacgtcacgccaatgctggaagagaaaaggagatcgccggggagcaggtcttgtgcgttaatttcagtcagcgtgttattagccaccgagctctggcgctgaagtttaactgcccattgctgcgatggtggcttaatagcggaagcggaaggcgcggaccggctgacgtctaccgtgcaggccgaaagtaaaaacaatgcgggaaaaagcaggacataatttgcccattgtttagccatgattacaatccctgtaaaaaagaggctctgaaaccagagcctcttttggcgttaacctttaatttgttgtaccaggtaattcacgatatcgccggttttaatcagctgcttctcgccgctgcgacgatatttatattcaatatcgtcgttgtcgaggttacggtcgcccagcacgatggtgtgcggaataccgataagctccatatcggcgaacatcacgcccggacgctctttacggtcgtccatcagcacgtcgatacccagcgcgctcagctctgcgtacagcttctcggccagctcctgcacgcggtaggatttatgcatgttcatcggcagaatcgcaacctggaacggggcgatagcgtccggccacagaatcccgcgatcgtcaaagttctgctcaatggcggccgccaccacgcgcgtcacaccgataccgtagcagcccatcgtcaggatctggttacggccatcttcgccctgtacggaggctttcatcgcttcagagtacttggtacccagctggaagatgtggcccacttcgataccgcgtttaatcagcagcgtacctttaccatccgggctcgggtcacccgccacgacgttacggatatcagccacttcaggggtggcgacgtcgcgatcccagttgatgccgaagtagtgtttcccgtcgatgttagcgcccgcggcgaaatcgctcattgcggcaacggtacggtcgataatcaccggaatgggcatattaaccgggcccagagaaccgggacctgcctgcaccagcgcgcggatctcttcttcggtagcgaaggtcagcgggctggcgacctgtggcagtttttccgctttaacttcgttcagctcatgatcgccgcgaaccagcagggcaattagcggagacttgctgtcttctaccgctttgaccagcagggttttcgccgttttctcaatcggcagattgaactgctcaaccagctcggcgatggttttggcgttcggcgtatcgaccagcgtcatttcctgagtggcggccgcgcgcggctctttcggcgcaacggcttcggcgaactcaatattggccgcgtagtcggaagagtcagagaagatcacgtcatcttcgccgctctgcgccagcacctggaattcgtgagatgcgctaccgccgatagaaccggtgtcagcctgtaccgcacggaaatccaggcccatacggctgaagattttgctgtacgcggcgtacatcgcgtcgtaggtttcctgcagagattcctgagaggtatggaaagagtaagcatctttcatcaggaattcacgggaacgcatcacgccgaaacgcgggcgcacttcgtcacggaatttggtctgaatctgatagaagttcagcggcagctgtttgtaagagctcagctcgttacgaatcaggtcggtgatcacttcttcatgagtcgggccgagtacgaacggacgttcgccacggtcagcaatacgcagcagttccgggccgtactgttcccagcgaccactctcttgccacagctcagagggctgaactaccggcattaacacctcgattgcaccggcgttattcatctcttcacgcacgatgttttcgacttttttcaggacgcgcacgccggtcggcagccaggtatataacccggaggccagcttgcggatcatcccggcgcgcagcatcagctgatggctgataacctcggcgtcggcaggtgtctccttcagagtggagagcaggtattggctagtacgcatgttgttacggttccatttggacgatcgatacagactgggagccagcctgacacaaaaaagtggtttagtttaccagtgtggcaaagatgccaaaagagaggaaaataaaattagcgtggttcgagagaaaagacttcaaaaccggacgaaatcacccgccagcgcacgttaaaatccagcagccagacggcgtaggtctttcccgggtcttcttctttacgatatgccgggcgcggatcttgcgccagaacttcgctaataaacatcttaagtcggggatagcgcttttccagttctaaaagccgggcttctgtttctggcgtgaagctcaccgccacttccgcctgcggtgcctgctgcgcgtagctcgcgctggcttccggcagcgcttcggcaaagggcaggtaaggtttgatatccacgaccggcgtaccatccaccaggtccagactaccgagttccagaacgacgtgttctttctggcagcgaataccttttagctcgaccagcgacataccgattggattaggacgaaaggtcgaacgggtggcgaaaacgcccatccgcgcattaccgccgaggcggggagggcgcacggtcgggcgccagccgccttccatggtctgatgaaacacaaacaggatccacagatggctgaagttttccaggccacgtacggcatcggcctggttataggggggcagaagatgtaattcgccgccgccgtttttaaccagcccaggctggcggggaacggcaaatttttctttatagggcgagcgaataacgcctatctgcgcaaactgaaaatcactcattgcgccgtaacgttaagcgctgaaccaaggcagacggcctggcggtagcagcccggagttccgctggtcacttcgcagcggtgcagcagcacggcattggctttcatttttgccgcgttaatctgcatgcgcttgcgcgccgtcgggatattgggcggagagtcttgattcgaggcctggcatgattcaccggtgacttcgccgagttcgcggaaaggtttacccaccaattctgttgcatcggtatagattcttaccggggccggacgcgtcgctttcggttttgccggttccgatttggcaggcggggttacggtgctttgtacaggctcgacgggagatctgcttagcatagaacaaccgcttaacatgagtgctaacaaacagaccggtaaagcacgcatagtatttcctcaataaataataaaacagggcgctattgaatcaggtgcttgcataaatgacaagacgggcataaagcccgtcctgaatgatattacgctgagaaaagattaccagcctttcaccgcaccgccgttaaagattttgttagccgcttcgtaaacttcatcactctgataggcctgaacaaatttcttaacattttccgcatctttgttgtcttcgcgagcgacaatcagattcacgtacggagactctttaccttccacaaaaataccgtcttttgccggcgttaagccaatctggctggcataggtggtattgataaccgccagagcgatttgcgcatcatccagagagcgcggcagctgcggggcttccagctcaacaattttcaggtttttcgggttttcaataatatccagagaggttggcagcagaccaacgccttctttcagtttgatcaggccaacctgttgcagcagcagcagagagcggccaaggttggtgggatcgttaggaatcgcaacctgagagcccggctgcagttcgtccagcgatttgatttttttcgaataacccgcaatcgggtaaacaaaagagttacctacggaaaccagcttgtagccgcggtctttgatttgctggtcaagatacggtttatgctggaaggcgttaacgtcgatatcgcctttgctcagcgcttcgttcggcagaacgtagtcgttgaaggtcaccagttcgacatcaaggccgtatttttcttttgctactttctgcgcgacttccgcaacctgctgctccgcaccgacgataacgccgactttaatatggttaggatctttttcgtcctgaccgcaacccaccagagccagagaaccgattaacgcgccgactgccgcaaaggttttgaaattaaaggccatgttatttccttcctgtaagattctgtattgtgtgtaatgttatttgtgagtcacagcccggacgatacgatcgcctgagaattggattaagtacaccagaataaccagcagcaccagtacggtattcattaccgttgcattgtagccgatataaccgtactgatagccaatctgcccgagaccaccggcacccacggcgccgcccatcgcggaatagccgaccagcgtaatgagcgtgatggttgccgcattcaccaggcccggcagcgcttccggcagcagaaccttacgcacgatctgcatcggcgttgcgcccatggcgcgggatgcttcgataaggccggtggggatctccagcagggcgttttccaccatacgggcgataaacggcgcggcgccgaccgtcagcggaacgatagccgcctgcaggccgatcgacgtgccaacgatcacgcgagtgaatgggatcatccacaccagcaggataataaaaggaatcgagcggaaaatattcaccaccgccgaaagcgtgcggtagagcttcgcattagcgacaatttgccccggacgggtgacgtacagcagcacgccgaccggcaggccgagaacaaaaccgaagaagccggagacaaacgtcatggccagcgtttcccatacgccgcgaaccagcagccaaatcattggttcagacatatcccagtacctctacttttacatggtgttcctgtagccaggcgattgcggcctgggtatcttcctgcgtgccgtgcatctcagtgagcataatgccgaacttgacgccgcccgcgtaatccatctgcgcactaataatgttgttattcacattaaaacgacgggcagtctcagaaagaagcggggcatcaacggagtgacccgtaaactccatgcgcagcatgggcacgctatcgggaagcgcttcaggtttaaggcgggcctgataatcatccgggatatcaaggtgcagcgttgactgaataaactgttgcgccagcggggttttgggatgagagaagacctcactcaccgtatcctgttcaatcagctggccgttgctgataacggcaacgcaatcgcagatgcgtttgacgacatccatttcatgggtaatcagcaaaatcgtcaggcccaggcgacggttgatatctttcagcagttccagaatcgaacgcgtagtggccgggtccagagcgctggtggcttcgtcgcagagcaggacttttggattgctcgccagcgcacgggcgatggccacgcgctgtttttgaccgccggagagatttgccggatagctatcgtgtttatcccccagaccgacgagatcgagcagctcggtcacccggcgcttgatttcatctttcggcgtattgtcgagctccagaggcaacgccacgttgccgaatacggtgcgtgaggcaagcaggttaaagtgctggaagatcatgccaatctggcgacgggcgcgagtgagctctttttctgacagcgccgttagttcctggccgcccacctgtacgctgccctgcgttggacgttcgagcaggttaacgcagcggattaacgtacttttacccgcgccggaagcgccgatgacgccataaatttgcccggcggggacatgcaggctgacatcgttcagcgcctgtatgctgcgatttccctgctggaacactttggtaatattcgaaagtttaatcatcagttatttattatcgtttagccgtttgccgtggcattttcttctgccgtgtccaggcgatgcctgtcaatgaaatggatgttaaggcatccagacgtctaaatcaatctgactctgtataatgagcactttcttgcgtccggaaacatgcgatactacgcgcattagcctttatcaggagcaaaccggtggcaatgtcagtacccgcaatttttcttgaccgtgatggcacgattaatgtcgatcacggctatgtccatgaaatcgacaactttgaatttatcgatggcgtcattgacgcaatgcgtcaattaaaggagatgggttacgcgctggtgctggtgaccaaccagtccggtatcgcccgcggtaagtttactgaagagcagtttgaaacgctgacggagtggatggactggtcgctggccgatcgcggcgttgatctggatggcatctattattgtccgcaccacccgcagggaaccgttgaagagtttcgccagacctgcgactgccgcaagccgcatccgggtatgctgatttcggcgcgcgactatctgcatattgatatggcggcttcctttatggttggcgataaagtcgaagatatgcaggcagctctggcggccaatgtcggcacgaaagtattagtgcgcaccggcaagccgatgaccccagaagccgaaagtgccgctgattgggtgcttaatagcctggcagacctgccggatgctatcaaaaagcagcaaaaataagcgttatgtataaaaggtgagcggttgaaataaaattgcattttaccgcttgtcaccgccgaataactccctataatgcgctcccactgacacggcagatgtgaatcacttcacaaacaaccgggtcggttgaagagaaaaaatcctgaaataacgggttgactctgaaagaggaaagcgtaatatacgccacctcgcaacggtgagcgaaagccgcgttgcactgctctttaacaatttatcagacaatctgtgtgggcactcaaagtgacatggattcttaacgtcgcaagacgaaaaatgaataccaagtctctgagtgaacacgtaattcattacgaagtttaattcacgagcatcaaacttaaattgaagagtttgatcatggctcagattgaacgctggcggcaggcctaacacatgcaagtcgaacggtagcacagagagcttgctctcgggtgacgagtggcggacgggtgagtaatgtctgggaaactgcctgatggagggggataactactggaaacggtagctaataccgcataacgtcgcaagaccaaagagggggaccttcgggcctcttgccatcagatgtgcccagatgggattagctagtaggtggggtaacggctcacctaggcgacgatccctagctggtctgagaggatgaccagccacactggaactgagacacggtccagactcctacgggaggcagcagtggggaatattgcacaatgggcgcaagcctgatgcagccatgccgcgtgtatgaagaaggccttcgggttgtaaagtactttcagcggggaggaaggtgttgaggttaataacctcagcaattgacgttacccgcagaagaagcaccggctaactccgtgccagcagccgcggtaatacggagggtgcaagcgttaatcggaattactgggcgtaaagcgcacgcaggcggtctgtcaagtcggatgtgaaatccccgggctcaacctgggaactgcattcgaaactggcaggctggagtcttgtagaggggggtagaattccaggtgtagcggtgaaatgcgtagagatctggaggaataccggtggcgaaggcggccccctggacaaagactgacgctcaggtgcgaaagcgtggggagcaaacaggattagataccctggtagtccacgctgtaaacgatgtcgacttggaggttgttcccttgaggagtggcttccggagctaacgcgttaagtcgaccgcctggggagtacggccgcaaggttaaaactcaaatgaattgacgggggcccgcacaagcggtggagcatgtggtttaattcgatgcaacgcgaagaaccttacctactcttgacatccagagaacttagcagagatgctttggtgccttcgggaactctgagacaggtgctgcatggctgtcgtcagctcgtgttgtgaaatgttgggttaagtcccgcaacgagcgcaacccttatcctttgttgccagcgattcggtcgggaactcaaaggagactgccagtgataaactggaggaaggtggggatgacgtcaagtcatcatggcccttacgagtagggctacacacgtgctacaatggcatatacaaagagaagcgacctcgcgagagcaagcggacctcataaagtatgtcgtagtccggattggagtctgcaactcgactccatgaagtcggaatcgctagtaatcgtggatcagaatgccacggtgaatacgttcccgggccttgtacacaccgcccgtcacaccatgggagtgggttgcaaaagaagtaggtagcttaaccttcgggagggcgcttaccactttgtgattcatgactggggtgaagtcgtaacaaggtaaccgtaggggaacctgcggttggatcacctccttaccttaaagaacctgcctttgtagtgctcacacagattgtctgatgaaaatgtagcagtaaaaaatctctgcaggcttgtagctcaggtggttagagcgcacccctgataagggtgaggtcggtggttcaagtccactcaggcctaccaaatttctgctgatgctgcgttgcggcgacactcacatactttaagtatgcttcgtgtcaccacgccttgcctcaacagaaattaaggttgatgagatttaactacgatggggctatagctcagctgggagagcgcctgctttgcacgcaggaggtctgcggttcgatcccgcatagctccaccatctttactgcacaacacaagaaaacttcagagtgtacctgaaaaggttcactgcgaagttttgctctttaaaaatctggatcaagctgaaaattgaaacgacacactgttcaagtgtgttcgagtctctcaaattttcgcgacacgacgatgttttacgaaacatcttcgggttgtgaggttaagcgactaagcgtacacggtggatgccctggcagtcagaggcgatgaaggacgtgctaatctgcgaaaagcgtcggtaaggtgatatgaaccgttacagccggcgatgtccgaatggggaaacccagtgcaattcgttgcactatcgttaactgaatacataggttaacgaggcgaaccgggggaactgaaacatctaagtaccccgaggaaaagaaatcaaccgagattcccccagtagcggcgagcgaacggggagcagcccggagtctgaatcagcttgtgtgttagtggaagcgtctggaaagtcgcagggtacagggtgatactcccgtacactaaaacacacaggttgtgaactcgaagagtagggcgggacacgtggtatcctgtctgaatatggggggaccatcctccaaggctaaatactcctgactgaccgatagtgaaccagtaccgtgagggaaaggcgaaaagaaccccggcgaggggagtgaaaaagaacctgaaaccgtgtacgtacaagcagtaggagcccactgggttgggtgactgcgtaccttttgtataatgggtcagcgacttatattctgtagcaaggttaaccgtataggggagccgcagggaaaccgagtcttaactgggcgttaagttgcagggtatagacccgaaacccggtgatctagccatgggcaggttgaaggttgggtaacactaactggaggaccgaaccgactaatgttgaaaaattagcggatgacttgtggctgggggtgaaaggccaatcaaaccgggagatagctggttctccccgaaagctatttaggtagcgcctcgtgaactcatcttcgggggtagagcactgtttcggctagggggtcatcccgacttaccaacccgatgcaaactacgaataccgaagaatgttatcacgggagacacacggcgggtgctaacgtccgtcgtgaagagggaaacaacccagaccgccagctaaggtcccaaagtcatggttaagtgggaaacgatgtgggaaggcccagacagccaggatgttggcttagaagcagccatcatttaaagaaagcgtaatagctcactggtcgagtcggcctgcgcggaagatgtaacggggctaaaccatgcaccgaagctgcggcagcgacactatgtgttgttgggtaggggagcgttctgtaagccgttgaaggtggcctgtgagggttgctggaggtatcagaagtgcgaatgctgacataagtaacgataatgcgggtgaaaaacccgcacgccggaagaccaagggttcctgtccaacgttaatcggggcagggtgagtcgacccctaaggcgaggccgaaaggcgtagtcgatgggaaacaggttaatattcctgtactcggtgttactgcgaaggggggacggagaaggctatgttggccgggcgacggttgtcccggtttaagcatgtaggcggatgttccaggtaaatccggaacgtcactaacgctgaggtgtgatgacgaggcactacggtgctgaagtgacaaatgccctgcttccaggaaaagcctctaagcatcaggtaacatcaaatcgtaccccaaaccgacacaggtggtcaggtagagaataccaaggcgcttgagagaactcgggtgaaggaactaggcaaaatggtgccgtaacttcgggagaaggcacgctgatggtaagtgaagcgacttgctcgtggagctgaaatcagtcgaagataccagctggctgcaactgtttattaaaaacacagcactgtgcaaacacgaaagtggacgtatacggtgtgacgcctgcccggtgccggaaggttaattgatggggttatcctcgcggagaagctcttgatcgaagccccggtaaacggcggccgtaactataacggtcctaaggtagcgaaattccttgtcgggtaagttccgacctgcacgaatggcgtaatgatggccaggctgtctccacccgagactcagtgaaattgaactcgctgtgaagatgcagtgtacccgcggcaagacggaaagaccccgtgaacctttactatagcttgacactgaacactggtccttgatgtgtaggataggtgggaggctttgaagtgtggacgccagtctgcatggagccatccttgaaataccaccctttaatggctggtgttctaacgtgggcccgtaatccgggttgcggacagtgtctggtgggtagtttgactggggcggtctcctcctaaagagtaacggaggagcacgaaggtcagctaatcctggtcggacatcaggaggttagtgcaatggcataagctggcttgactgcgagcgtgacggcgcgagcaggtgcgaaagcaggtcatagtgatccggtggttctgaatggaagggccatcgctcaacggataaaaggtactccggggataacaggctgataccgcccaagagttcatatcgacggcggtgtttggcacctcgatgtcggctcatcacatcctggggctgaagtaggtcccaagggtatggctgttcgccatttaaagtggtacgcgagctgggtttagaacgtcgtgagacagttcggtccctatctgccgtgggcgctggagaattgaggggggctgctcctagtacgagaggaccggagtggacgcatcactggtgttcgggttgtcatgccaatggcattgcccggtagctaaatgcggaagagataagtgctgaaagcatctaagcacgaaacttgccccgagatgagttctccctgactccttgagagtcctgaaggaacgttgaagacgacgacgttgataggccgggtgtgtaagcgcagcgatgcgttgagctaaccggtactaatgaaccgtgaggcttaaccttacaacgccgaagatgttttggcggatttgagaagacaacaatttcagcttagattcagagttgagtacgcgataaagaattgcgtactgagcacaaagaatttgcctggcggcactagcgcggtggtcccacctgaccccatgccgaactcagaagtgaaacgccgtagcgccgatggtagtgtggggtctccccatgtgagagtagggaactgccaggcatcaaattaagtagtaagccggtgcataaatccggtggttacagaagtattcggtggagcggtagttcagtcggttagaatacctgcctgtcacgcagggggtcgcgggttcgagtcccgtccgttccgccacttattaaaagccctgagcatttgctcagggctttttctttgcctgtcgctttattattgcttttttagcaaaaatcctctgcgtttagcgctctttttctcaatcctctcgttggtcataattaccctcgttaaccgatatgaatgaataaagaggaaaatcatgacaatccctgcatttggtcttgggaccttccgtctgaaagatgacgtggttattgcatctgtaaaaacggcgcttgagctgggctatcgcaccattgataccgcgcaaatctatgataatgaagctgctgtgggtcaggctattgctgaaagcggcgttgcgcgcgatgaactgttcatcaccaccaagatctggattgaaaatctcagcaaagacaagctgatcgccagcctgaaagagagcctgctgaagctgcgaactgactatgtcgacctgacgttaatccactggccgtcgccaaacgatgccgttgccgtcgaagagtttatggccgcgctgctggaagcgaaaaagcaggggctgacccgtcagattggtatttctaacttcaccattccgctgatggagcgggcaattgccgccgttggcgcagagaatatcgcgaccaaccaggttgaactctctccgtacctgcagaaccgtaaagtggttgattgggcgcgtgaacacgatattcatatcacctcttacatgacgctggcctacggtaaggcgctgaaagatgaagtgattgcacgtattgcgacgaaacataatgccacgccggcacaggttatcctgacctgggcaatgggcgaaggttatgcggtaattccgtcttcgacgcggcgcgaaaacctggcaagcaaccttaaagctcaggatctgcagcttgatgaagacgatcgccaggcgatcgccgccctggactgcaacgatcgtctggttagcccggacggtctggcgcctgaatgggactaatctaatccccctctgtactctacaaccctcttacagctccttcgggagctgttttacatgttcgctaagaaagtcgataaaggctctgatccgcgtgcttacggctctgtcgctgtagtaaaccgcgctaaacggcatttcaaccggcagccgtttatcagccagcagttcgacaaacgtcccttcagcaatttccttatccaccatatagtccgacagacaggcgattccgttaccggccaggcacagctgcttgagcgtttctccgctattggaagatatctcgctttcgatttccagcagctggccatcgcagcaggagactggccaggtattcaatgaaacaggttcgctaaaaccgaggcattgatgattttttagctcagcgacgctttgcggcgtgccatggcgagcaagatagtccggtgaagcgattattttgcggtagctattaaacaatggcctggcgcgcaggctggaatcggtcagcgtgccggcgcggatcgcgacgtcaactttccgctcaatcagattgataaaggtttcggacgagaccagcgtaaggctcatctctggataacgctcgcggaagggttttatcaacggcatcagaaaatgcagtatcaccggcgtcgcggcatcaacccgtaatagtcctcttggcgtcgtacgactctccagaagttcattttcggcagcggccatctcctgaagcacaacctgcatgcgacggaaataacgttctccttcttcggtcaggcttagctgacgggtcgtacggttaagcaggctcacgccgagctttgattccagctttttcaccgcccggctgacggcggaattggcctgacctagctgttccgctgcgcggctaaagctgccgctctcgaccacggcgacaaaaatggcgatttcttctgaggtagctctcattattgcacctgtggcaaaattctattgatactttggctatttttgttattaaagcatctcttcatactacgtgtcatcttaatcatgttgatacggagtacattatgccgctggcgctacttgccttaactatcggtgcctttgctattggcacgaccgaatttgtcattgtgggcctggtgcccaccattgcagaacaactcgctatttcgctaccctcagcggggctgttggtttctatctacgcgctcggcgtggcgattggcgccccggtgctcaccgcgctgaccgggcgtatgccgcgtaagcaactgctgctggcgttaatggcgctgtttaccgccggtaacctgctggcctggcaggcgccgggttatgaaactctggttctggcacgcctgctgacgggactggcgcacggggtattcttttcgatcggatcgacaattgcgaccagcctggtcccgaaagagaaagcggcttcggcgattgcgattatgtttggcggtctgaccgttgcgctggtgaccggcgtaccattgggcacctttatcggccaacactttggctggcgcgagacgttccttgccgtgtcgatccttggcgtaatcgcgttaatgagcagccttatcctggtgccgaataacattcccggtcgtgtcagcgccggtttgcgcgctcagctccaggttctgactcatcctcgtttactgataatctatgccattacggctttgggatacggcggcgtattcaccgcttttaccttcctggcgccgatgatgcaggatcttgccggatttagcccggcggccgttagctggatcctcctgggctacggtgtttctgtagcggtgggcaacgtatggggcggaaagctggcggataagcatggcgccgtgcccgcgctgaagctgatttttgccgccctggttgctttactgctgatctttcagtttacggccagcattcagtatgcggcgctggcgacggtactggtgatgggcatcttcgcattcggtaacgttccgggtctgcaggtatacgttgtgcagaaagcggagcagtatactccaggcgcggttgacgttgcctcaggcctgaatattgccgcctttaacatcgggattgccttaggatcggtgattggtgggcagacggtagaacattatggtctggatcagacgccctggattggcgcgctgatagttctggtcgcgctgttgctggtggttcttagcggccggctcgataagcctcagcgctgtgctacggttctttccgtagaaggataaaggtttctggcaaattgcattgaaagtgtatacaaaaatccctataacagaaggaccagctgcagtctcgggctggtttcctgttatcgaggtttgatgcctaaattgcgaaagaatacctatgccatgcgctacgtcgccggacagcctgcggagagaatcttacctccggggtcgtttgctggcatgactccggcttttccggcgggagtaccgttaagttcggatgaaaaaatccgcgtactggtgtggaacatcttcaagcagcagcgcgccgagtggaaatcagttcttaacaactttggtaaagatgcgcacctggtgttattacaggaagcgcaaaccacgcctgagttagtgaaattcgccacctccaattatctggccgctgaccaggttccggcactggtgcttccgcagcatccttccggcgtgatgacgttagcttccgcccaccccatttactgctgcccactgcgcgagcgcgagcctatcctgcggctggcaaagtcagcgttggtcaccgtttacccgttaccggatacccggctgctgatggtggtaaatatccacgcggtcaactttagtcttggcgtggatgtctacagcaagcagctgctgccgattggcgaccagattgcccatcacagcgggccggtgataatggcgggtgactttaacgcctggagtcgtccgcgaatgaacgctttgtatcgctttgcgcgtgaaatgtcgctgcgcgaagtccgcttctctgacgatcagcgccgccgtacttttggccgcccgcttgattttgtgttctaccgggggttaagcgtgcacgatgcttccgtgctggtgacccgcgcgtccgaccacaacccgctactagttgaattcagtcccggcaagcctgattaattaaggtatgtcaggcctgccatgggggcaggcctgcgtatgcatggtgctgcctttattactcaaaaaaccgaaggacaatgcaatgacaacacgctctcatcatgacaacgtcgaaaaacagtttggctcacaggccagcgcctacctgagcagtgccgtacacgcttctgggcgcgatctgcagcgcctggccgaacggctggcggacttccctcaggcccacgtgctcgatatgggatgcggtgccggacacgccagctttgcggcggcagggcaggttgcccaggtaacggcatatgatttatccagccaaatgctggaggtggtggctcaggccgcaagggataaaggttttgctaacattgccacgcagcagggctatgccgaatctttgcctttcgctgatgccagctttgatgtcgcgatcagccgttattctgcgcatcactggcatgatgtcggccaggcattgcgcgaagtgaagcgggtgctgaaaccgggcggagtgatgattattatggatgtgatgtcgcccggccatcctgttcgcgacgtctggctgcagacggttgaggcgctgcgcgatacctcccatgttcgcaactactccagcggcgaatggctgacaatggcgagtgaggccggtttggtgataaatcatctgctgaccgatcgcctgcctctggagttcagctcctgggtcgcgcggatgcggacgccagaggcgctgacggaagcgattcgtttataccaggagagcgcatcggcggaggtcaaagcctattttgcattgcagcaggatggttctttcaccagcgatacgattatgtttgaggcccataaggccatctgacgcagagataaaacaaaaggcaccgcatgggtgccttttttaatgcctgctgaatcatcaggattctggtctgtcgctatttttcacaaacagcgtcagctgatcgccgggtttcaggttgccggtatcgctgttccagcgcatcacatcgcgaatgttcacgccatggcgtttcgcaatgctcgacaaagagtcgcccttacgcacgcgataggtaatgctatcgctattgtttgccagacgttcagcgctgctgcctgcgccaatcaccagattctgaccgaccttcaggttagaaccgcgaataccgttccactgctgcagatctttcgttgatacgccgagacgcgatgcaatgccggagatggtgtcaccggagcgcacctggtagctgcggctggtcaacggcttgttgtcagccagcagcgtcggctgcacggcggcaatatcaccggaggccaaagactcacgcagctgcgccgcatgcttctgcggtaccagtacgtaattcggcccgttcgcgcccagagtcgaccccttaacgcctgcattgaacgttttcagcttgctgacgggcattcctgccatatccgctagctgtgaaatctcaaccggactgtcgagacgtacacgcgccagggcacggctttcgtctgctgtcggcagccttacgccataccgcttgctgttcttgagaatatcgctcagggccagcatttttggtacgtatattttggtttcctgtggtaatgacagcgaccagaaatcggtgggtttaccccgtgatttgttcgctttgatagccttcattacccgaccttcaccgctgttataggcagcgacggttaacaaccagtcgccgtcgaacattttgttcagacgttgcatcatgtttaacgctgccgtggttgaggcaacgatgtcacgacgcgcatcgtaactgcgggtctgtttcaaaccataattgcgcccggtgctcggaatgatctgccaaatgcctgcggcattggcgccagacgttgcgtgcgggtcaaaagcgctctccactatgggtagtaataccagttccattggcatgttacgtttcttaacttgcccggctatccagtacatatacggctctgcccgtaaagttacatcgtggagatagctcttatttcttaagtacttctgtttttgttcgcgaatccggacgttttccggaattcccatctttagctcgtcgcttattgaagtccacagatcctggtcttgcgcgtagaaggttccatcatctaaccagcgcgctcgacttgtgaacttgcttgcttccccttgactcgctgcagaaaggctctgtgcgtgctgttgtacggtgccatcgttcttagacgcttggcaccccaccagcaggacagaggcgagtaaaatcgctcgtgccttcatgtgtgtgtcaatagttgcttaaaagacgagcaaggataacggtgaagtcgtctgaagacaagaattaaatatcagaagtcgtctttctttgaccttaaccaggcaaatcgctgaatagagtgttgcaaatttgtttctttgtctatttctttaattaaatcatcatcatccgttcgaagaaataaattaataagacgctcatttttcagagttacggggagtgttttttggttttttgtacgtaactcattaactttgcggtagtaatcgtttatctccctatcatggggaaggatgcttattgcaaacttcatgtttgctaaagtgtactcatgtgcgcaacatattaatgtttcgtcaggaagggcgccaatcttcttaaatgattgatacatctgctctgcggtcccttcgaagagtctgccgcagccgccggaaaacattgtatcgccacaaaatagataaggtgcgctgtagaaacagatgtgtcctaaagtgtgacctggcgtggcaaaaatagaaaattcgcggcccaaaacagtgaggctatctccgtccttcacgacgtgggttgcgcccttatcctgggtttctgccggtccgtaaaccaccaggttcggaaatttttcccgcagttgtttaacgccgccaacgtggtcgcggtggtgatgcgtcaacaagatggcttccggctgccagcggttttgttcgatggcggtgagcacgggcgcggcttctccgggatcgactatcaggcagcgcccgctatcttcactaagaacccagatgtagttgtcctgaaatgcgggaatactgataagattcataaattacctctaatgcgtagcggaaggttgcgatgaagccggcaaggatacctcatacagttacagcgccagagcactggtccagcatgccgtggggcgaatactaccgcgaatcgctggaacggcagatgaaaccgtggctcgctaaattatatggctttcatttacttaagattggcaatctgagcgcggaaatcaataccgaagcctgcgcgatttcccatcaggtgaatgtctctttgcaggggaatcctgtgcaggtaaaggccgatccgctgcatttgccttttgccgaaaagtcggtagatgcctgcctgctggcgcataccttaccgtggtgcagcgatccgcatcgactgctgcgggaagcggaccgggtgctgattgacgatggctggataattttaaccagttttaatcctgtaagcctgatggggttacgtaaactggtgccggtgttacgcaataagcccccctataacagccgcatgttcaccttaacgcgtcagatggactggctggggttgctgaattttgaagttatgcactacgggggctatcaggtccttccctggtcgcgccacggggggaaaatgctcagcacgcatctaccggcgttgggatgtctgcagctcattgttgcccgtaaacgcactatcccattgacgctaaacccgatgaaatcgggcaaagcaaaaaaacggataccgcaggcggtaggcgccacgcgtcagtggcgcaagggggagaattaactttctgcctgataaccgatgtcgtcccgggttgggttagatgccgccgagcgcgccagttcgtcgcaacgttcgttttccggatgtccggcgtggcctttaacccattcccattttatcttgtgttgacccagcgcggcgtccaggcgctgccagagatcgacattttttaccggtttcttgtcggccgttttccagccgcgttttttccagttgtggatccactgcgtaatcccctgacgcacatactggctgtcggtactgaggatcacttcacaatgttctttcagcgcttccagggcgacgatggcggccatcatctccatgcggttgttcgttgtaaggttaaagccttcgctaaaagttttttccttcccgcgatagcgtaaaatcgcaccgtagccgccaggacctggatttcccaggcaagaaccatcggtgaaaatttctacctgtttgagcatctctggtagacttcctgtaattgaaatcgatacgtaaaacggtaagtctgacataaatgaccgctatgagcactgcaattacgcgacagatcgttctcgataccgaaaccaccggtatgaatcagattggtgcgcactatgaagggcacaagataattgaaatcggtgcggtggaggtgatcaaccgccgcctgaccggaaacaacttccacgtctatttaaagccggaccggctggtggatcctgaagcgtttggcgtccacggtattgcggacgaattcctgatggataagcccgcgtttggtgatgtggtcgatgagtttctcgactatatccgcggcgcggagctggtcatccataacgcatcgttcgatatcggctttatggactatgaatttgctaagctgaatcgcggcattccgaagacggataccttttgtaaggtgaccgatagcctggccctggcgcgtaaaatgttcccgggcaagcgtaacagccttgatgccctctgttcacgttatgaaatagacaacagcaagcgaacgctgcacggggcgttgctcgatgcccagattctggccgacgtttatctgatgatgaccggtggccagacgacgatggctttctcaatggaaggggaagggcagcagcaggccggagaaataggcattcaacgcgttgtgcgcgccgccagcaaattacgggtggtttacgcctctgatgaagagctgatgaaccacgagtcgcggctcgatctggtgcaaaagaaaggcggaagctgcctgtggcgggcctgatttacccataaacgcgctaaaaatagtctgttgggtgatttttgcagcaagcgattcaaaaatgaagaaaaagcgttgacggagtagaggggaatccgtaatattcgcctcgtccccaagggaacagtaagtggagcggtagttcagtcggttagaatacctgcctgtcacgcagggggtcgcgggttcgagtcccgtccgttccgccactattcagaaagcctgaatcagcaatgattcaggctttcgtcgttttagcctgcagaacacattctcttccccgtcttcgccagccatccgtcgcgccgggctgacaacgtttgcccgcgagcctggtgttaacagcattcatattcttgttccgcgctgcgggcgtttacctgcagggctctgggcgagcgggcgggatagcgctggtttgaggcataaaaagggagcctgggctcccctgccaggctggctttagctgagcgtgaaggggtcagcgtcctgccaggccggaaacttctcgcgatactcttttagcgacgtcagcgaaagctcagcatccaggcgagtcgcctgatgcggttcggccgtcgcgataatctcaccctgcggcgtgattatccgactatcgccccggtaatggtgcccgttgccatcggtgccgacgcgattgcatccggcaacataagcctgattttcgatagctctggcgaccagcagcgactgccagtgcattgagcgcagggcgggccagttggcaacatacagcgctaaatcgtagtcgttatggttgcgtgaccatacggggaagcgcaggtcgtagcataccagcggcagaattctccagccgcgccaggcaaaaatgacccgctcgttacccgctgcgtaatgatgatgttcatccgccatgcgaaacaggtggcgtttgtcatagaaatggattttaccgccgggctcaaccagcaagaagcggttaaccggaccgcggtccgtttgcagcgcggcgctaccggcaatcagcgcgttggtttggtcggctttagcctccatccaggctaccacttcctcttgcgacagcgactgttttgctgcttccatcgcgaaaccggtggtgaacatttcgggtaaaacaatgaggtcacgcccggtaatcccttccagttgacgatcgaaatggcgcaggttggcgggaccgtccatccacaccagcggttgttgtaaaagggtaattttcagtccgggcacggtggtgaactccagtatgatgagaggaattataatgactttaacaccatatcagccgatggacggctcagggaatattttgtaaaagaatgacagccctggaaataccttccgctgaattgtcagaaaaaaagagaggcggggaagtccccgcctcgatcgtgatgggtttatttttcgtttttaagccgcttcgatcttgcgcactttctccggtagctttaccgggcgggtcgccagttcatccggggcgaaatcgtcgacgttaatgctgcgcagtcggctggtttccgcacggaccaggatgtccgcctcgtcctgattgattaacccttttgccagcgcgttgcgggccagttcatcaagacgcgtaaacgacagattcttgcccagctctttgcacaggcgctggtggatagggtctgctgccataacatcaagcagcgcttcttccagcaggccaaccggattatgctcgctcggcgtcagatactgaccgcggccgatacgcgaacgcgtcgcgctcggaacctgcaggattttcgctaccttatgatccagcttgtctgaaggcgccaggtaatgacgtccggtcgggaagattgccacgcgaagcgccccagcgaccagacgattcgggaagttcaccaacagatcgtcaatcgactgctcggcctgatacagcgcatcctgcaccccccagtgaaccagcggtaagtccgcttcgttacgcccctcatcgtcatagcgtttcaggaccgccgacgccaggtagagctggctcagcacatcgcccagacgcgcagaaattctttcacgacgcttcagactaccgcccagcaccgccattgagacatcggacagcagagccaggttggcgctcagtcggttcatatgttgatagtagcgacgagtggcatcgcgggtcggcgagctgctggtgagaccgcgggtcaggcccagccagaaactgcgtaccttattgctgcccacgtgcccgatgtgtttaaacagcagcttatcgaaagcgttaacgtcgttattctgcgcggccgccatttcatccagcacgtacggatggcaacgaatcgcaccctggccgaagatcatcatgctgcgggtcaggatattcgccccttcaacggtgatggcgatcggcgcgccctgataggcccgcgccaggaagtttccggtgccgagcataatgcccttaccgccggtaatatccattgcgtcaataatggaacgctgaccacggtgagtacagtgatacttcacaattgccgacagtaccgctggtttttcgccaagcataatgccgtaggtaatcagcgaggcggcggcatccattacgtaggcgttgcctgcgatacgcgccagcggttcttcgatcccttccattttaccgatagagattttgaactggcggcgaatgtgcgcgtaggcgccggtagccatggcgacggatttcaggccgccggtagcgtttgacggcagggtgatgccgcgtcccacggataaacactcaaccagcatccgccagccctggccggccatcgacgggccgccaataatgtaatcgataggaacgaaaatatctttcccctgggtcgggccgttctggaacggaacgttcagcgggaaatggcgacgcccgatttcaacgccgggggtgctggtggggatgagcgcgcaggtgatgcccagctcctcttctccacccagcaggcggtctggatcggagagtttaaacgccagccccagtacggtggcgataggcgcaagggtgatatagcgtttgttccaggtcaggcgcatacccagcacctgctggccctgccattcgcccatgcagacgacgccggtatccggaatggcgccggcatctgaacccgcttccgggctggtcagcgcgaagcacgggatctcctggccgcgagccaggcgcggcaaatagtggtttttctgttcttcggtaccgtaatgctgcagcagctcgcccgggcctaatgagttcggcacgccgacggtaatcgccaggatcccggagacgcccgacagcttttgcaggacgcgagcctgcgcgtaggcggagaattccagcccgccgtactctttcttaatgatcatcgcgaagaagcgatgctctttcagataggcccacagctccggcggcagatcggccatctcgtgggtaatttcgaagtcgttcgccatacggcaggcttcttcgaccgggccgtcaataaaggcttgttcttcagcggtgaggcgcggctgcggatagttgtgcagtttctgccagtccgggttgccgcggaacagatcgccttcccaccaggttgtgccagcgtcaatcgcttctttctcggtgcgcgacatcggcggcatgaccttacggaaagcgcggaacgccgggactgaaatcatggatttacgcatcggcgcaaggttaaacggcagtaaaacgatcgccagcggaatcagcagccagatattccacagccccgcagcgccgagcgcggcggtccagataagcaaaatcgcgctgctcagcagcagattgattcggtgatagaagagcgcaccgagtaaaacaacggttgcaacaatactcaaaatcatcatagagaaatgctccctgtcttgtaggaggtctgaccacttgtgatgatatggttgtagtggatgtaatttgttttagcaatgtgtttacaaaataattacaaccttgctcacattgttgtacggaaatgcggcacataaaatcaaaagcacaggggattgcatcgcgtgctgcttctcgctgcgtcggctatccggtaaactgcctgggttatcccacaaatactgaaggattatcctcatgtaccaggatcttattcgtaacgaactgaatgaagccgctgaaacgctggctaactttctgcaggacgaagccaacattcacgcgattcagcgtgctgcggtgctgctggcggatagctttaaagctggcggcaaagtcctttcctgcggtaacggcggttcgcactgcgatgcgatgcattttgcggaagaactgaccgggcgctatcgtgaaaatcgccccggctatccggccattgcgatttccgacgtgagccatctctcttgcgtcagcaatgatttcggctatgaatatgttttctctcgctatgtagaatcagtgggtcgtgcaggcgacgtattactggggatctctacttccggtaactcaggtaatgttatcaaagcgattgaagccgcccgcgcccaggggatgaaagtgattactctgaccgggaaagatggcggtaaaatggcggggtcagcggatgtagaaattcgcgtaccgcattttggctacgccgaccgtattcaggaaatccatattaaagtgattcatatcctgattatgctgatcgaaaaagagatggttaaagcttaaaaggctattttgttagccattttgaacccgggcagtgctcaagatcctcacgtacatgaagtacgctccggtttctgcgcgctggccgtgtccaaactggctgcaccaattacgccttttatgtttcagtaagtggtatgaggtgaactatgtgcgaattgctcgggatgagcgcgaatgtgcccacagatatttgcttcagtttcaccgggctggtgcagcgcggtggcggaaccgggccacataaagacggctggggcattacgttttatgaaggtaagggctgtcgcacatttaaagatccgcagcctagcttccagtcgcccatagcaaagctggtgcaggaatatcctatcaagtcctgctcggtcatcgcccatattcgccaggccaaccggggtatcgttgcgctggaaaacactcacccctttacccgggagctatgggggcgcaactggacctacgcccataacggtcaactggaggggtatgagagcctcgagacgggaagtctgcatcctatcggggagaccgacagcgaaaaggccttctgctggctgctgcatagcatcaccgagcgctatccggaaatgccgggcgatatggttgaggtattcagatttatcgccacgcttgccggagcgctgcgtgaaaaaggcgtgtttaacatgctgctctccgacgggcgctacgtgatggcgttttgctcgacgaatttatactggattacgcgaagggcgccgtttggcgtagcgacgctgctggatcaggatgtagaaattgactttcaacgcgagaccacaccgaatgatgtggtctccgttatcgccactcagccgcttaccggcaacgaaacctggaataaaattatgccaggcgagtgggcgttattttgcctcggggaccgagtagtttgacgcgagctgcggctgcacaacttcgtggctgagcggtttgctcaccacgtagcggccattggctaccgaaaccaccggcggcttatgcgtctgccggaagtagtcgtacccgggtttcagctgctgccagaaatccgcgaagtaggaaaatttgtgacgggccatgttggcgtcggtcatgcggaaaggataaatgctcacctgaacgttgggctggccgaagactaacgcgccggtgacgaactggaagatttcatcaatgccggtatcggtcatggcgtaacagccaacggatacgcaggcaccgtgaatcatcagatactttccttcatagccatgcgcgcgatcgtaggcgttcgggaaaccgatattgatcgctttgtagaaacggctgtcgggttttagctgattgcgggaaacgttatagaaaccttcggggctcttgaaatcgccctggcgctgctttggaccgagcccgccggagtagttacagattcggtagctgtcgagaagctggtaggtttcgcccatcttgacgtaaagatcgagcatgcgctcttctttgaagatctcaatgtagaccggcgaacccatgagctgctgcttatactctttgctcatcggcgttgtcgagctgttactgctaagtagccctgcgaatgaaacgcacggcaacagaagcatcgcaataaataatgcgattttgcgcatactacttgttccttgataaaacaaataaccacattgccaggacggcaagagagacccgaaatcagagttttctggttttagagcgctcacattagcatcacggcattttttcgcaagcacgacgtgccacgtttacgttttagttttccgttatagcgaatattcaggtaaagcgcagtcagaactttgcgtaatagctcgcattttagaacgacttaatggcagtttgtctacaggcgctgctcacgaaatgttacacttgctccgctaaatactcagggtaagaaaggatgcttctctcccgtcttgtgaatcaccaggactacgatgttcctttcttcctcttattttccattaattatgctggcctcggcctgatgccggggtttacgtaacggatacctgctaacgatatgattaaaatcacgaaagggctaaatttgcccatagctggcatgccatcacagcagatttcttcgaagactgcggtcaagcgcgttgcgctgttgggggaagagtacatcggtatgcgcccctcgatggcggtgcgtgaaggagaccgggtacaaaaaggtcagcttctgttcgaagataaaagaaatcctggcgtgcgatttactgcccctgcgagtggaaccatcagcgccattcatcgcggcgaaaggcgggttctgcaatcggtcgttattgacgtagatggcgatgatgccgttcattttccccgctatgaattagccgatcttgccgcgttgacgcgcgaggccgtgcagcagcagctggtggagtcggggatgtggacggcgtttcgcacccgccctttcagcaaaatacctgcgccgggcagcgttccagcggccatatttgtcaccgccatagatacgaatccactggcggcagaccctcagccaatcattctggcccagcgcgaggcttttgacgcgggcttaaccctgttgacgcggttgaccgacggtaaggtccacgtctgccaggccagcggtggcaagcttggcgggcatcccgtgggccaggtgaccttcaaccagtttgccgggccgcatccggccgggctggtcgggacccacatccattttctcgagccggttagcctgaaaaagcaggtctggcatcttaactatcaggacgttatcgccgttggcaaattgttccttgaaggggagttgtctagcgaacgcattgttgcgctcggcggcccgcaggtgaaagagcctcgtttattaaagacctgctctggcgccagccttgatgaactgctggcagatgaacttctggatgatgaaaaccgcgttatttctggttcagtcctcagcggaacgcatgctcaagggccccatgcttttcttggccgctttcatttacagataagcgtcgtaaaagaggggcgtgagaaagagctgttcggctgggtaatgcccgggaaagataaattttccatcacccgcaccacgctcggccattttatgaagcgtaagctatttaatttctcgacggataccaacggtggcgagcgggctatggtgccgattggcaactatgagcgagtgatgccgctggatattctgcccaccatgctgctgcgtgatttgctggcgggggataccgacagcgcgcaggcgctgggctgtctggaactggatgaagaagacctggcgctttgcacctacgtatgtcccggcaagtacgaatatggcccggcattgcgcagcgtgttaacccagatagagcaggaaggataagtgatgggcttaaagcaactgtttgacaaaattgagccgcactttacgcacggcggcaagctggaaaaatattatccgctgtttgaagcgacggcgacgctgttctacacccccgggcaggtcacgcgcggcgcggcgcacgtcagagacgccatcgatctcaagcggatgatgattctggtgtggttcgccgttttcccggcgatgttctggggaatgtataacgttggcctgcagaccattccggcactgcataaattatacggcgctgagcagctgcagcaggttatcgccgggaactggcactacagcatcgcgcagtggttgggggtgaacttcaccgctgacgccggttggctcagtatgatgaccctgggggccgtatttttcctgcctatctacatcaccgtgtttcttgtcggcgggttctgggaagtcttgtttgctatcgtgcgcaagcacgaaataaacgaaggcttcttcgtgacgtcaattctgttcgcgctgattgtgccgccatcgctgccgctatggcaggccgcgttcgggattaccttcggcgtcgtcatggccaaggagatttttggcggaaccgggcgtaactttctcaacccggcgctggcggggcgcgcgtttttattctttgcctggccggcgcaaatttccggcgacctggtgtggactgcggcggatggtttctccggcgcgacgccgttatcccagtgggcaagcggcggcggtgaatcgctggttaacgtctctaccggccagccggtaagctggatggacgccttcctcggcaatatcccggggtcgattggcgaagtctcgacgctgatgattctcatcggcggcgccatcatcatttttggtcgcgtggcctcgtggcgcattgtcgcaggggttttcatcggcatggtggccaccgcgacgctgtttaactttataggctctgataccaacccgatgtttgccatgccgtggtactggcatctggtgctcggtggttttgctttcggcatgatgtttatggcgacggacccggtgtccgcgtcgtttacggataaaggtaaatggagctatggcctgctgatcggcgtgatgtgcgtcctgattcgcgtggtcaacccggcctatccggaagggatgatgctggcgatcctcttcgccaacctcttcgcgccgctgtttgattacctggtggtgcgggccaatattaagcggaggaaatcgcgtggctgagaataaaagtaacgatagcatcggcaaaacgctgctggtggtgctggtgctttgtctggtctgctcaatcgtggtcgccggttctgccgtggggctaaaatcgcgccagcaggagcagcgcgctctcgataaacagcgcaatatcctggcggttgccggtctgatgaagcagggaatgagcgcagatgaagtggctgacatttttaaggcccatatctctccgcgtttagtcgatttagccagcggtgagctgctggataaagatccgggcaagtttaatcaggctcaggccctgaaagaccctcagcagagcctacagctggaggcgagtcaggatcctgccggtatcaaacgccgcagtaatattgccgaaatttacctggtgcgcgatgaaaagcagcagattcaggaagtggtactgccaatttacggtaacggcctgtggtcggtgatgtacgcttttgttgcgctggaaaccgatggccgcacggtcaaagggatcacctattacgatcacggtgaaacgccggggctgggcggggaaattgaaaatcccaactggcgccagcagttcgtcggtaaacaagtgcttgatgataaagggatgcctgcgctgagaatcgtcaaaggcggcgcgcgtcctggcgacctgcacgccgttgatggcctgtcgggcgcaacgctgacgtcaaacggcgtgcagcatagctttgatttctggatgggcaaactgggctttggcccattcctgcaaaaggtgcgtgaaggggagctgaataatggctgatttgggcgacatgaaagaaatgaagcgcgtgctggtggggccgcttatcgctaataaccctatcactctgcaggttctgggcgtctgctccgcgctggcggtgaccaccaagctggagaccgcttttgtaatgaccattgcggtgacgctggttacggcattctccagcatgtttatctccatgattcgccaccacattccgaatagcgtgcgcatcattgtacagatggcgattatcgcttcgttggttatcgtcgtcgatcaggtgctacgcgcgtttgcctatgagatctcgaaacagctttcggttttcgtcggtttgatcatcactaactgtatcgtgatggggcgcgccgaagcctatgccatgaagtcaccgccgttggcgagctttatggacggtattggcaacggtctgggatacggggcgatcctaatcatcgtcggtttcctgagagagctgatcggcagtggtaagctattcggtattaccgtgctggaaacggtgcagaacggcggctggtaccagccaaatggtctgtttcttctggcgcccagtgcgttcttcattatcggtttgttgatttgggcggtgcgcagctggaagcctgaacagcaggaaaaggagtaaccgattatggctcattatattagcctgtttgttcgcgccgtgtttgttgaaaatatggcgctggccttctttcttgggatgtgtactttcctcgcggtatcgaaaaaggtctcgaccgctttcggactcggcgtggcggtaacggtcgtacttgggctggcggtgccgatcaataatctggtgtataacctggtgctgcgcgacggtgcgctggttgaaggcgtcgacttaagctttctgaactttatcacctttattggcgtgattgccgcgctggtgcaaatcctggagatgatcctcgataagtacttcccgacgctctataacgcgctggggatcttcctgccgctgatcgccgtcaactgtgcgatctttggcggcgtctccttcatggtgcagcgtgactataacttcaccgaatccatcgtttacggctttggctccggcatcggctggctgctggcaattgtggcgatggcgggcattcgtgaaaaaatgaaatacgcaaacgtgcctgcgggtctgcgcgggttagggatcacctttattaccacgggtctgatggcgctgggctttatgtcattctccggtgtgcagctataagggcggaaagtatggaaataattcttggcgtagtgatgttcacgctgatcgtcctggtactatcggggctgatactggccgcgcgttcgaaattagtgaatgcgggcgacgtggtcattgaaatcaataacgaagcggataaacaaattcgtactccggccggcgacaagctgctgaatacgctctccagcaacggtatctttgtttcatccgcctgcggcggcggcggctcctgcggccagtgccgggtgacggtgaaagagggcggcggtgatattctgcctaccgaactgtctcatatcaccaagcgtgaggcgagagagggctgccgtctggcctgccaggtcgcggtgaagcagaacatgaaaattgagctgccggaggagatttttggcgttaagaagtgggagtgtgaagttatctcgaacgataacaaagccacttttatcaaggagctgaagctgcgcgtgccggacggtgacgcggttccgttccgggccggcgggtatattcagatcgaatgcccctcgcacaaggttgcctatgccgattttgacgttccggacgagtatcgcggcgactgggataaatttaaccttttccgctacgtctctgacgtgaaagagccaacgctacgcgcctactccatggctaactatccggaagagaagggtatcatcatgctcaacgtgcgtattgcaacgccgccgccgcaggtacctgatgcgcctccggggatcatgtcctcctatatctggtcgctgaagccgggcgataaagtgacgatttccgggccgtttggggaattttttgccaaagaaacggacgctgagatggtctttatcggcggcggagcggggatggcgccgatgcgctcgcatattttcgaccagcttaagcggctgcacagcaaacgtaaaatcagcttctggtacggtgcgcgctctctgcgagaaatgttctatgatgacgaattcgagcagctggcgcgggaaaacccgaattttaccttccacgtggcgctctccgatccgcagccggaagataactggaccggccataccggctttattcataacgttctgtatgaaaactatctgcgcgatcacccggcgccggaagattgtgaattctacatgtgcgggccgccggtgatgaacgccgcggtcattaaaatgcttaaagatctcggcgttgaggatgaaaacatcatgctggacgattttggaggctgatgatgctgacggtatttgtcgcgacctttgtgattttcgcgctggttatcctgggaatgtcgcttggttatctgatcaagcgcaaaagtattcagggcagctgcggcgggatctcatcgctgggtatggaaaaggtctgcgactgtcccgagccctgcgatgcgcgcaaaaaacgcctggctcgcgaagcgcagcgcaagcaggatcgcatcctataaacagcaggccgcaccgtgcggccttttttgatttaccaggctttcgctttcgccggcgagtctaccattacgccgtcggcgccaagctcgcttgcggtacgaaaatcatcggcactattaatgccgaagaagacaatatgggctttgccctgtgagcggaaacaatccatagcttctttatcccaggtgagcgtggctggcgatacgccttcgcccagcgtgaacttctccactacttctaccttgcgtttcagctccagaccgtaccagtattcattgcccgacgccgcggttggctggcactggtggctaagtgaaatattagccagcttcgttcgcgtttcgccccggctgacgaaatgggggattgatgctggcagcgccgcgatatagcggtcttccgttgaatacacccgtacgcgcgagaggctattggttttttgcagtacttcgctaagacgcgccgccatgatggccggatctgcatcaggcgatttgatatcgatgtaaaagaaggtctgcggccactgttccagtaccgattgcagcgttggaatggttgcgtttttaccgcgccaggggtgagtttcaccgccccatgtccatcccgcgtccatacgggtcagctcggcagcgctgaagcttgagattttccccgtatggtcagtcagcgcggacagatcgctcgggcgatataagaccggaacgccatcctggcttaattgtaccgttatccaaatcgcctcggccttattctccagcgcaagttttatcgccggaagggtattttccggcgcatcgccggtgcctccccgatgcgcaatgagctgcggcgcggcgcaggcgctgctggcaataagcaaaccaagcgcagtaagtattgatttcatgattgcattcaccttatatgctcatataactatatgaaaagtaacttatatttattgcaattttatgttgtagcacgtttttcaggatagtggatttaaaaagattaaatttcgccgtattttgctatactgtatgcatgtacagtctaaggtttggctatgcgtaaaatcatccacgttgatatggactgcttcttcgcggcggtggaaatgcgtgacaacccggcactgcgcgacatccctattgccattggcggcagtcgggtgcagcgcggtgttatcagtacggctaactatccggcgcgtaaattcggcgtgcgcagcgccatgccaaccgccaccgcgctcaaactttgcccccacctgacgctgcttcccggccgctttgacgcctataaagaggcgtcgaaccatatccgggaaattttttcccgctatacctcgttaatcgaaccattatcgctggatgaagcctatctcgacgttagcgacagcgttcattgtcaggggtcggcgacgctgatggcgcaggagatccgcgagaccatccatcgtgagctaaatttgaccgcttcggcaggaattgcgccggtaaaatttctcgcaaaaatcgcctcggatctgaataaacccaacggtcagtttgttattgcgccgcatcaggtcgcggagtttgtcaaaacgttgccgctatcgaagatcccgggggtaggcaaggtttccgccgcaaagctcgagagcatggggctgaggacctgtgaagatgtgcagaacagcgatctggcgatgctgctcaagcgctttggtaaatttgggcggatactgtgggaacgcagccaggggattgatgaacgagaaatcagcagcgagcgccagcgcaaatcggtgggcgttgaacgaaccctgatagaagatatccacgaatgggtggagtgtgaatcgattattgagaacctctacccggagctggaacggcgactggcgaaggttaaaccggatttgctgattgcccgtcagggggtcaagctgaagtttaatgattttcagctcaccacccaggaacatgtctggccccggctgaataaagatgatttgatttctaccgcgcataaagcctggcacgagcggcgcggaggtcggggagtcaggctggtggggctgcacgtgacgctgcttgatccgcagctggagcggcaactcgttttgggattgtaacaatgttaacgataagaatgtacgaagagcgggattttccggcgctatgcgcactatttttacgcgccgttaaagagaccgccagcgctgactattccccccggcaaattgccgcctgggcgcaggttgatgaagcccgctggcggcaaaaacttgcggcgtcacgcgtactggtggcaataaatgatgcctcgccggtcgggtttattaccgccgtggatgactatatcgatttactatttgtctctcccgactatagccgccagggcgtcgccagcgcgctgctcaatacgctattgaggcagcttcctgagcgcgcttatagggtagaggccagtattacggcaaagcccttttttgcgcgtcacggcttcacggttattcagccacaggaagtgacggcgcggggtgaacgatttcttaattatttgatgcggcggcaaatcgaccccacatacagcgcgtgacaggtatgcccggatgcggttaccacaatcggcacggcgtgctttcgctcggtcattttataaagaaaaggcccactctctgcggagtgggcctgtgttgtcttacttcgccggaatggatttcagcagttcagtcaacagcgtccagtactggcccacgctttcgatatgaacctgctcatccggggagtgaggaccggtgatggttggcccgatagaaaccatgtccatatccggatacggttttttgaacagaccgcactccaggcccgcgtggataatctggatgttcggcgtcttgttgaaaagacgctgataggtttcacgcaccagatgcatcaccggcgagttggcgtccggctgccagcccgggtaggcgcctttcgcttcggtttttgcaccggccagcttgcccagcgaatccagcatgctcacgacataatttttgccgctgtcgatcagcgagcgaatcaggcagtgaatctgcacgttgtcgccggtcatggtcaccacaccgacgttcagcgaggtttccaccacgccttttgccacatcagagttgcggatgacgccgtttggcgtggcgttcagcagacgcacaaaggtatcacgagattgggccgtcagcgcaggctgctcgttagcaaccgactccagcagcacagtcaggtttttctctttggccgccagctcgtttttcaggatcgcctggtattcattagccagcgctttcagcgcgtccgctttatccgcggccacggcgaccgtcgcgaacgcttcacgcgggatcgcgttgcgcagggtgccgccgttgaaatcgaccaggcgcagatccagctcttcagcatggcctgcgaggaagcgtgccagcagcttgttggcattacctaaaccaacgtggatctcgccgccggagtggccgcctttgagtcctttaagggtcagcttaaagctctggaaaccggccggaacggcttcacgggtcagcgccaggtcagaggtgaagtcgataccccccgcgcagcccatgtaaatctcaccttcttcttcggagtcggtgttgatcaggatatccgcctgcagccagttggcctgcaggccaaacgcgccgtccataccggcttcttccgtcatggtcagcagcacttccagcgggccgtgaaccacgttgtcgtcagccagtaccgccagcgcggaagccatgccgataccgttgtcggcgcccagggtggtgccgcgcgctttgacccactcgccgtcgatgtacggctgaatcgggtccttagcgaagtcatgaacggtatcgttatttttctgcggcaccatatcgaggtgcgcctgcagcacaaccggtttgcggttttccataccggcagtcgcgcctttacgaatcagaatgttgccaacctggtcgcgttccgcgtgtaagcctttttcttttgcccagcccatgatgtgctcagcgagctgttcttcgtgataggaggggtgaggaatagagcagattttggcaaaaatatcccacagcggctgcggggataattgagacagttcagacacgataagtctccttacaatcacctgcaaaagtcgtttgcagatcgaggggttagcaatcaaatacactacaagcccgggcttgcgcgatggggttgagaataccactttccgtgtactctggtagtgtaaaccacgtaaaaagagtcgtcgtggccgcttaacgctggtttttagcgcgtcagatctctataatctcgcgcaaccattttccccctcgaacattatttaagccgtattacacaggctgggacacttcacatgagcgaaaaatacgtcgtcacctgggacatgttgcagattcacgcccgcaagctggccacacgcctgctgccggttgaacagtggaaaggcattattgccgttagccgcggcggtctggtaccgggagcactactggcgcgtgaactgggtattcgtcatgttgataccgtttgcatctcaagctatgaccacgataatcagcgtgaactgaccgtgctgaaacgtgctgaaggcgatggcgaaggctttatcgtgatcgatgacctcgtcgacaccggcggtaccgccgtagccatccgcgaaatgtatccgaaagcacattttgtcactatcttcgcaaaaccggccggtcgcccgctggttgatgattatgttgttgatattccccaggatacctggattgaacagccgtgggatatgggcgtggtgttcgtaccgcctatcgcaggtcgttaatttccagcataaatgctaattaccacgcccggttttgccgggcgtggttttttttacccttgcgcaggttacaatagcttcagtggcaacatgatggaggctgcacatgtcccaggctaaccttagcgaaacgctgtttaaaccccgattcaaacatccggaaacctccacgctggtgcgtcggtttaataccggagcgcagcaaccgatccagtctgcgctcagcggtaatcacgttgatcactggtatcgattgattaaccgcctgatgtggatctggcgtggcgtgacgccgcaggaaatcctcgacgtgcaggcgcgcatcgtcatgagcgatgccgagcgaaccgacccggagctttacgatacggtcgttggctatcgcggcggcaactggatctttgaatgggccaaacaggcgatggactggcagcagaaggccggtcaggaagcgaatctgctcgtgagtggtcgtcactggctccatgcggcaaacctttacagcattgccgcctatccgcacatcaagggcgacgagctggcggaacaggcgcaggtgctggcataccgggcttatgaagaagccgctcagcgcttgcccggcaagctgcgagagctggagttctctatccccggcgccgcgccgatcaccggtttcctgcatatgccgccaggcgatgggccgttcccgacggtactgatgtgcggcgggcttgacgcgctacagaccgactattacaacctgtatgaaaactattttgcgccgttgggtatcgctatgctgaccgtggatatgccttccatcggtttctcctcaaaatgcaagctgacccaggataccagtctgctgcaccagtatgtgctgcagcatctggctaatgtgccctgggtcgatcatacccgcgtggccgcctttggtttccgtttcggcgcgaatatcgccgtgcggctgggctatcttgagtcccagcgcctgaaggcggtggcctgcctggggccgatggtacacggcctgctggtggacccgctgcatcaggggcgggtgccggagatgtatcttgacgttctggcttcgcggctggggatgcatgacgcttccgacgacgcgctgcgcgttgagcttaaccgctattccctgaaggttcaggggctgctggggcgccgctgccccacgccgatgctctcaggcttctggaaagacgatccgttcagcccggaggaggagtcgcggctgattacttcatcatcatccgatggcaagctgctggagatcccgttcaatccggtctatcgcaatttcgatcacgcgctgcggcagatcgcccgctggattagccatagatttagttaatatattgctaaattctatcgatttggtaacgtcatggcatcactaaaggagatcgcaatgacgttaccgagtggacacctgaagagtaagctgattaagaaattcacggcgcttggcccttacatccgtgaggagcaatgtgaagacaaccgcttctttttcgattgcctggctgtttgcgtcaacgtaaaaccagcgcctgaaaaacgcgagttctggggatggtggatggagatggaagcgcaggaatcgcgtttcacctatagctatcagtttggattgttcgacaaagagggcgtctggcgtccggtcgcgattgacgatcctgaagtcactgaaaagcttgaaaagacgctacgtggttttcacgaacgagccgaagcgttgctggcgacgttcagtcttaagctggagcccgccgatgattttagcgaaccggttaagctgagagcctgagttccggtcagcggctgtcatcctgctcgcaataaaacccgcgtttcgaccagcgcgggtttccttcccaggcaaacccgcgctaaataccgtttaatacccgacagggttgaccgacggcaatcattcctgcggccagatctttggtcaccaccgtgcctgccccaaccttgacgttgtcgcccagcgtgaccgcgccaatcaccacggcgtgggcgccaaattcgacgttatcgccgatgcgcgggctgtcgccctcacggccctgactgtcggtcacgctgccaatcgtgacgccctggcgcagggtgcagttctggccgatgaccgttccccgattaatcacgatgcagtgcggatgatacagcttcagcccatagccaatgcgcgctcgccacggcagctcaatgcaaaataaacactcgttaatcacgatattgagaataacgaaggggataccgcagatcttccacagaggattacggctgcgatagagcgtcgccagacgataaagcagaaccgcgattttcgcttttatgccgccgcaggatttgatttcccgggcgaccagcctgatagcctcaaacatggttattccttaaggttaaacgaagccagtgaataccatccatcaccggttttaccttcgttagcgagttgaatacgcggctggccctgataattggtcagggccgcttccagacgatattggccgcccgggagtccggcaggcagcggcagcgtagcgctgctgtgatgatcgccgggcagccactggcgaacgtcatccgccgttttgatttgcgtaacggtcgttccggcgtcattgactatccgccattgcacaaggtacgggagataggctggcgcgacgccgtcgttacgccaggtgacgtttagcgtaagcggcatgccgctgcgtacgggcgtatcccattccagctgacccacccggtagcggtagccgattcgcaataacgcgctatcaacgatatcgcgatacgctgccggcaccggacgcgatttcagattcaaggtactggcgtgctgcgctaatgcccagtcgaagcttgcctggacctcttcgcgggtatagtgctgcacgctttcccactccgccatataaccgcaaatttccaggctaacgggggcgtgctgccagctatcattaaacccggaccacgccgtctgcgccgcggccaggcgttgaggataatcatcgcgcatatggctccactctgcggaaaagttatgccagtctccccagcaatccgcgcgccaccccgcgcctttttggctggcccaggccagcgaattaccgccgctgattagcatgattttgggcgttttcgggaagctgctgaagtgcatatcaacgtagcgattgagctgctccggagcgtacttttccagcaacggcgcaacgtcagggaaattggagttgtgccattccccccacgaacccaccatgccgatatcgacaaacgcgaggttcggattgccgtcataacgcgcgccgagggcgttaagcagcttttgcgcataggcgataaaagtcggatcgctgaggtccggcacaaaggttttgccattttcgacccattgtccctgaatgccttttttgataagccaggcggggattttcgagcccgattgcggttcatcgagcgccatgaaacgcaatccgacgttcatcgccggctgatgccgggcggcgacgctgaaagcacgatcgatcggcgcaaaatcatagacgccttcttcaggctccagatcgctccagtaaaagcgatcgtattcaaacccggtgtccggatactctttcagagaaggcttctggccataaccatcgtggaaactggccacgccgatccctgggttcgttaacagaccggtaaaggccggcggggtgataaccgtgcgttcagccagcactgccgctgagggtatgactccggccagcagtagcgccacaagcagcgcggcgcggcgcagcgaaaaagagctcatcgttaattcactttatcgtggaggttcacaaaccacgtccagataccgacgtggaagtttttaaacacatcgatacccagcgcggatttcagcatatagagcgccagcagcaccgcaagaatggcgaacagcacggcgatggtaatcgccagggtggagaatatacgcccgagcagcgtactctctcgcggaattttgcgcagatcgcggccgcataaaaagaccacgaaatagcggcgatgcagaaaaggaaaactgtggcgaaaatcgatgcgatggcgcgaggccaggctcgatctcaccagcgcctgttcaataccgcgcttttgctccggcgtgagtgaggtttctgtttccgggtcaagcgcggaataaaagcgctcgacgaccaggtcggatgttgatttagtcacggttgactcttattcgttaaacgctgatagacctgagcggtttttgccgcaatgtccggccagcggtatttgggcatcagttggctgtaatccgcggtctcctcgccgcgccaggactggagcttttgcgccagcgcggcgacattgcccgtcggaaaatagacctcggcaggcaggccaatctcgaggttggccgggatatcgctgacgataaccggcagtgaccaggacatggcctccagcagggcaatgggcagcccttcgtgataagacggtagaacaaaaagcccggcctgtgagaacaaagtgtgcagcggatcgccgctaataaaaccggtcatgatcgctcccggggtttcggccgcctgcttcttcagccgctcgctgtactcatcgggatggtcggcatcgccaatcagcaccagcggcagcgaacagttcgaggctttgtaggcggcaagcagatcgtgcagccctttttcttccacaaaacgggcgacggcgacaacgtattgcccggcttccagcgaatactgattcagcgtggcccgtcgcgtctcttcggcgggaagctgcggttggcgcacgccgttatagatcacgttagcgttggtacggccgtgtttggtcttaatcagcgtattaatcacttccgagataacaataacctcgttggcatatttcaccgcccatttctcaccgaggcgcagcatctctttcgccattttgccccacttctggcgatcgtagtccgggccgtggtgggtaaaaacgacgcgtttgccgagcaggcgcagcagcgggaccaccaggcctgggccgaccgcgtgaacgtgaaccacatttgagccgtcaaacagggtgctgaaggcggccagcgtagagtgaataatggcttcgaatttacggcttttgggcgcccacaggcttttcaaccgcacgcctttatattcgctacggcgatagtccacgtacggtgagcgggcaatgacgcagatatcggcgtgattctggtgatagatttccggatagagattctggcagtgggtctcaacgccgccctggacgttcggaataccgcgggtgccaagcaccgtcactttgagcttcatttcgcttcccccacgagctgctgatagagttcctgcagaacctgcatatgccgggcgagatcgtatttctcctctaaacgctggcgtgcgttgatgcccatttcacgcgcctgctgcggattgacggccaggctatccatgatgcgcgccagcgcgtcggcatccccgggttccaccagatagccatcaatgccatcgcgaatttgctccggaatgccgccgatattgccgccgacgacggggcgaccgaacgccatggcctccagcaccgacatcgagcagttttcataatattcggaagggacgatcactgcccgcgcgccgcgaatcaacgcgttgagcgcgtctccgtggcgcatatagccgagaaattccggaccgctaaagcgagcgcgcaggtcgctgccgagagggccatcgccgacgattttcagcggcatggactgctgcattttttgctgcgccagcgccagggtggcgacgcctttctcacggctcaagcggccgatatagaggaaataatctcccgccgtatcgcccgggatcgtggtgctggcatcaataccgttgacgatcacatcgatccgcgacctgggtaatttacgccgcagcgtctgacgcataaattcgctgggagcgataatgcaatcgagcatggcgtaattttgcgcgaacttttgccagtaggcctcaagcgagagcagcaggcttttaaaggtatcgccctgctggcaacgatggcgaaaggcattgctcaccgaaccggtaagacagtcatcgcagacgtggccatcgcgtagcatggtgtacgatgggcagacgattttataatcgtgcgccgtcagtacggttttgcagccaaagcgcttagcgacgccaatcaatgcgggcgtcagctggtggtagatattatgaaagtgcacaatatccggacgctgctccagcagcagggtgttgagcttattgcaggcctcagcgttgtagataaagtcgatgcccgctttgagcttgcccgtcagcccgtggctttgatgataatccacgttatgtacgaagaagctttcccagggcgaaggcttattttccgcatgctgcatgctgaagtcgacaacctgatagcccgcttgcagcatggcgtctcgctcctggaaaaaaacggtttccgctccgcccttaataaaaaagaatttattaacgaataatattttcatgttctgtctggatatgttttgggttggagacggtcacggcgggttgtttcagcggatcgcgaacggcgttaatcaggcctcgcaccatacctgcggaaaataacgataagttgatcacgctctggacaccgtcccgcagcgacttatttttaatcgccttcagcgcgataaacgccagcagcggaagcagggcgataataatcaccccgggattgagcgacaggaggcaaataatcaataccaggatatacagcgtgaatatcagttcgttgcgaacaatcttaagcgcggcggggaaatgcttttttccccagcagttgcgtaatagctcacccggcgcccataaaaaaccgttcttccagcgataggtcagcattttaaatgtcggcatggtataggacgcatggctaaaatagggcgcggcgaggcggtggagtttatagcccgcggcctgcaagcggatccccaattcggcttcttcataaccgtgaaggttaagattggtcagatagccaattttctcgattgccgaacggcggtaaaggccgccgccgccaagatgatcggtatcgccctgcggatagataagatgcagacgctgcttgcgcgatttaaactcatagttagcggcgtcatccatctcgacgctgcccgccacgcccgcatattcgggatgcgtttcaagaaacgccacggcggtgtcgagaaaacccggctccagctccatatcgccgtccagcagcagcagatagtccccttcgctgaataaccagcccagctggtggcccacgccgcagcagcgatctttcgcgttatcgaggcagaccaccatcgcgtctttggcgacggccagctcccgggtattatcggtggacaggctatcggcgacgataatctgatgcgggtaaggctgcaattgtttgcggacgctgtcgatcgttttttcaataccctgcgcttcgttgagggtcttaatgctgacggtaattgatggcgttttattcatattgggtaccggagttcagacggacggaacgatgaatgacaataagcgccccgagggccagccataataaaaactgtagcatgggaatgatcatcaggatctggctgtagggaaggctgagcaaacagccaatggcaaagacgtaaaacgcaggcgcggagctgagcagctgtaaatcttcccgtttgagatcgcagcgggaaaaggtctctttgggccgcatgccgatgagaatagcggcaatcatggcgataaataagatcacgccgataataccgacttcccacagcatcatgctcagcgcggtggagtcgagtatcagatgataccaggcgccgatatagccgggggagacggtactgccgctgttggtagcgttcagaccgtagccaaacagcatcccgccggggccaaaaagctcgttatgctggagccagaagaaaatagtggtaaaccgaccgagctcgccgctttccataatgtaattggtatcaaagatatagccgagggaatcgataaataccgagagcgcgcttttggtcgggtccccgccgaaggccgacgagtaattggacgccagaatggtgatagcggcaaaaattagcaccaccattccggcggcgataatcatcaacgagcgcagggtgactttgctgatgccgctgacgtaagcgggcatgatccacagcagcgccagtaagaaaggcgacagcagaatcacgaattttacctcgcccaccacgcagaggaaaaaggccagcacgatatgcgccgccatcgacttgaacgagcagataccgtgcttaaattcggacaccttcagcagcataatcagcaggcagaacatccccatggccgcggtattgccgccgcccatcgggtcgccgccaaacgtgccgaccaccgaatcccacttttcatcctcgccgcgcaaagccacgcgttttggcaccaccaccagcacctgatagatagccagcgggaactggacgtagaacagccagtaaaatagccgggtcaggcggtgcagctgcgactcgcgaaacatgccgagcagcatgcaaaacatcaccagcgacagggccagttcgtttttgaagccgacgatggcggtaacgatgccggattgtaaaaccgtggcgcagaggctaaggatgataaacgtcagatacagcgccagcaccaccttctcgcgcgcgctaagcgccagcggctgcggccggctttgcatcatcagcaggaccaccatcaccagcaccatgaaaaaggggagccacagcacggctgccacgccggtgaaatactgaatcgtgccgcagaagacgatggtcgtcagcgcgaatacctccagatagcgaccggtgtttagctgcatattttctgctcctgccgggagagctgtagcgcccgtttgttcattttcagcaggatgaacagatagcgaatgctggtcagcacggagaacgtcaggagggctatctcatagcgctggcccaattcaggcagcgcgataaaagcgacgataataatcagcagctgctcgatctgaatgcgtaaaaaatagcgtttagaaccaaagataagctcaataacggtcagcggactgacggccagcgcggcgaacagataaggcagcatatagcgtgaggtcggaatggaattgagccactcctgactgaagcccaggcgcatgaccagcggatagaaaatccagatcccaaggatacagatcagcgccgcggccatcagcagcaggcgaatctttttgtactccggatagttaaaggtgccgttgcgaaaatccatcgaccattttgaaaagatggagttgcgcaccgcgttaccgacaatcatcaccggtgataaacagaagcggctcaccaccgagaaatagcccgcgaccagcggtgaaaaccagatatttatcaacatcgtcggcagattattgctggccatcgccagcacttccgcgctgccgacgcggctgaggtgctgccagtgctggcgcgcaaaaaggccgttcgctcgcggtgaaaagtgcgccggcgtcagggtgctgaagcgaaacaaacgcagcaggcagaggccgagcagcagcaaaatgcccgccatccaggcaatatagaacagcgtggtattcggcatcgccagcagagctatcgccaccaccagcgacacggcgatacgctggaaggtgaggaactgatagttaccgccgcgcagcgagaggttctcggcgatcaaaaccagcgcatagccgaaggtgagcaggtagagaaacgcgatattgagatggaatatcagtccggtgatgaccgcccacggcagcgccagaagcaggctttgcagcaggcaaaacaccacgttctgccccagctcatgctcttcctggcgcgggatcagcagctgcgacgcaaaggtgcaaacctgtgcgccaatcagcacgttgctgtagatcatcgcatagtgcccgacttccgccatgccgtagcgatgggaaatcagccatacggaaaaagcgccgatcgcctgcgagaggaccgaggagctggcgattgaagaaatactcttaattaagttcataatcgctacttcggtgaaatcagttcgcccatgccgcgctcgggcaggcgtttgccctcctgcgtctccaggttctcttcttgcacccggttaagcatggtggcgacaggcgttggcgcagcggcttgcagacgatgttgcgcgtcgcggatgcgcgacgcctgctcgcctgcgttgaccaccagcaggctgatatcgacgtgcggcgccagcagcagggcgtcctgggctagcccgagcgatggcgcatcaataatcagataatcgtaggtctgccgcagcgtcgtcagcagcgccgggagccgttcagaagtgagcagcagcagggctgagtcgctgagttcgcctcgcggcataaaatccagcgtctcggaaaggggggccatcgcctgggacgcggcgctgcggccatcaagacgctcgctgaaccctgttttatgctgaggatagcgcgcggagagccccgcgcttgccagataatctatatcgatgagcaaggttttgcctgacttagcggcggaccacgccagcatttcggcaatcaggctgctgcctgcatcggcctgcgccgaggttaccagtatcgtcccgctatgagtattctggccgagcagcgccaggcgcaggctgtggagcatatcggcatacagcaggttctggaacgtcagcttcgcgctgttcgcctgaggcaacagcggaaactcaccgctggcatcaaggcccgttttggctttcagttcgctgatgctgttcaccgttttgtcgagcgcggtgctgactatcaggtacatgatgtacagcgccagcgccatcagggtcgccatcacgataagcagaccgcgctgcggtttagaaggaagatttggcggcacggcggcatcgtagatcacttcatcgggaaccgaaaagctctcggagagcttctgctcattcgcccgctgatacagcgatttatacagctcttcggttttgttcagcgcggtcatcatggtgttgtatttgtcgcgcctggcgcccagcgcctggaagtcggctttctgatcgtcgagcatcttctgatagtgctgctcatcgtccagcgcaatctgatactgctgacgtaagccgttaagtagttcccccaacacctggcctatctgcccgttgacgacctgcagctgggcctgagcctgaagatatttcggatgcttagggccatagtgttttgccgcttccgataagttacgccgcgtctggatcagcgcgatacgcagatcctgaatctgcggatgaccggaaatttccggcagcgagatgatggcttccggcgcttttccctgctgacggcgcactttgtcccacaccgtttgcgctttcagacggcgctgggtggcgtcggccagatggttaatcacgatccccaggcgctcggtctcgtagccatccatgctgcgaaaggtcagcaggccattttgtttgagaaaatcatcgatgtcggctttctggcgatcgagcttatcgcgcagatcgtccatcattttctcgttccagccctgggcctgaagtaagattttctgcttctgcgccaggctgtaatcgataaacgcctgcgccacgccgttggcgatatcggcggctttttgcggcgatttcgcctccatcgaaacggataccagctgcgtggtgcgcacgccggagatggtcaggtttttttgcagggcgcgcagcgcattattgacccgtgcggcctcatcaagattgtccccgccgttaaattccgggtcccgatccagctttagcgcttttaccgcggcttccagcacgacgcgggagcccatcagcgcgtatttggtttcatagtaatcgctgcgggtggaatcatagttttccagccgcggcaggggggtaacatcctgcgactgcgctttaaacagcaccgtcgcggttgcggtatagctggatgacataaagcgcgtcaggatccacgacgccgcggcagccaccaccaccaccaccaggcaccagatcagcttgtgcttaattttgttgaaataaggcgtgaagtcgataaagccttctttcttctttccattttcaactaatgaaatagccatatcagaagaaactcatgccaatgatgatggtatctccggcctgtacggcggagtcggcggcgacgttttccagcagtttaccgctgcgaaactgacgaatgcggatgtcatggcgatcggcgcgatcggtaaagccgccggccagcgcaatggctttttcagcggttaagcccggttcccaggcgtaaccgtccggttttttgacttcgcctaacagataaattttacggtattcggcaatgctcacggtcaccattggcgcctgcagatagttaccgcgcagcttatcggcaatttcgttgccgacctgttcaggcgttttccctttcagcatcagggagcctatataaggataatcaacgctgccgctattatcgatttttacgcgcatagtgagatcctgctcgccggaaaccgcgatattgatctcatctccctggtccagatgataaacggcatccggcggcgttcggatcgtctgcggcggcgccgaacagcccgccagccatagcgccagaagagaaatcaccgcccgttttccatagctaaggatcatatttgtacctgtgtcataaaaataatggccgagtcgttgtagcccagcgtgcgctcgacctcatggtcatagtccgggccaatataaaaggcatctttttctttattagaatgcatcgtgttccattgcagcttcagctgaaaattaacggatggacggtagtcgtagttgaaggtgagcgacacgaggtttgatcgatctttgcgtccgttggtctggtgtttgtaatcctctgtaatataagagtaatcaaccagagtggagaacctgtcgaccagccagtggtgctcatagcccagaccgaaatttgataccagaatatagccgccggagtcggtgggatcttttattcgttgtgaactatgtaagttgagctttatctgttcaagtggtttccaatcggcgttaatatcccagttcaggccgttgaatccctgcgagtcgggattatggataaaatctttatacagccaggcgacgttgccgtggatctcggtcttgccggaaagacgatttttcatgccgaccagcagataatattcattactgtcttttaacgggttgagctcatagcgacgctggttggtaataaaactgtagcgatagcgcagcgttttggctttttgatcaaaaagctcggcgaccaggctgttttcatgccactcctgatcgtgcatgtaataatgaaagtcggcgctggcgtcctcaatgctgtcgagattgcgaaagcgcagctgcttatgcattagcgcaacttctgctttaccgcgcccttccggcgccccgtagctatagcgcagttcactgttaaagaagcgcgtggcgatgggcttattaatgccaaactctttaaactgctcggggagaaacccctcggtggtatcgcggccgcgctcttcatggccgaacgtttcatcgagatccaacgacagtccgtgcatgcttccgaagcgccacttgccgttaaacataaaaaaatgattgtcgcggttatctgcgctatcgctggcgtagcggcggtaatcgccggagtacatcaataaataacggtcctcgtagcgttcgccgatggctttgaaaatcggcttaacgccttgataagcggagccgatttcattcccgccgtagcgttgccaggtcacgttgtcattgtaaccgacgtcataacccacctggctctcgaaatcgatgccagccacaccggtatgtggttttgcctgcaggtcagcccatgcgtaaggcatcgccagcaaacctgcgaggaaagtgagttcagaacgcattcttccccacaaatccgcggaaaaacgttaaaaacacaattttaatgtccagcagcagcgaccacgactgaatatattccagatcgtactgaatgcgtttttccattttatcaatcgtgtcggtttcgccgcgaaaaccgtgtatttgcgccagcccggtaatgccgggcttcactttatggcggatcatgtaattttccaccagcacgcgatactgctcattatgcgcgaccgcgtgagggcgtgggcccactatcgacatggttccctgtagcacgttaaaaaattgcggcagttcgtcaagagaggttttacgtaaaaaggcgccgaagcgggtaatgcgcggatcgttacgcgttgcctgggtcactaccgcgctgttttccatcacgcgcatggttctgaacttccagacggggatctgtttaccgttcaggccgtaacggttttgtttaaacagcaccgggcccggcgaagtcagcttaatgccgatcgccaccgccagcatgaccggcaggctgaccagggtaaaaaaagcgccaagcacgatatcttctatacgcttgagtaccgcgccttcgccttcaaacggcgaggtaaaaatgctgatcgtctgaatattgccgaacatccgcagttgagaaatatgtgagctgtaggaaaacaggtccggtaccagaaacacatctacggtggtgtcggaaaattcattcaagaactggcgaatacgctgctgggcgaccatcggcagggcaatatagacttcatcgatttctccggctttcgccagcgccagcaggtctcgtgagttgccttttttctcaatgctgagcaggcgactgtcgcgctgcacggcgcggtcctcaaagaaggtgatgtcaatcccgtcgtgggtatactccttaaacagcgcctgctcgatggccagcccggctggcgttatgcctaaaatagccaccttgagtctggatttgaaaaaatagcggctggagataacgcgaatcagaaacatactaataaatatggcaatcgagcacagcacaataatttcagctaatcgcaccgcgtttgtgctggcgtgattgttcagtaataattcggcgcttacaaacaataaaaatgataacaagccgcttatactgacgctgaaaaacaatttagttaatttttttaaatactggcctttaaactgaccagaatatagctgaaagtgttcattggctctgataaaaatcagtgaatatattatgcccaggaacagagaggccgttgagggttcgacgaaaaagtattttaaataagcgaaaatgaacaagttgacggcaataaaatccagtagcttcatcagcttactatagcgggcgttgtatattttaatggtgctatccgtcatctttttgctcgttttatagtcaataaaatgatgtcctgtccttctttaaagctgaatttatgtctatgaatctattcaaaaattaagctttagctcggcgttgattattgtagcctacgattaatcttatgtcgaacctgccccggactgagaggagataacttttcctgacgtgcaataatatttttatcattgcctgaagcataaaaatggcggttacgattaaataggggcggagagacccgggtggcaaacgaatggccgtcagggctacagttcctggccgatccgcacttgagcgttaaaaaatccgcgccagcggggctggcgcgtttatcggctaaatcccaatgcacatgtatttgatttctaagtaatcctcgatgccatacttcgacccttcgcggccgagaccggaagatttcacgccgccgaacggggcgacctcggtggagatcaggccggtgttaatcccgataatgccgtactccagcgcttcgccgacgcgaaagacgcggctcagatcgcgagcgtagaaataggccgccaggccgaattcggtgtcgttggcctgagcaataacatccgcttcatctttaaagcggaatagcggggcgagggggccaaaggtctcttctttcgccactttggcatcaccggggacatccaccagaatcgttggctgaaagaaatttccgccgagctcatgaactttcccgccggttactattcgcgcgcctttgcccagcgcatcggcgatatgctcctgtactttggcgatcgctttctcgtcaatcagcggcccgatggtgacgttgggctgcaggccatcgccgatttgcagcttactcaccgcctgctgaagcttttcggcgaaacgatcgtagacgccatcctggacatacaggcggttggcgcagacgcaggtctgcccggcgttgcgaaatttggaggccagcgcgccttcgacggctttatccagatcggcgtcatcaaaaacgataaacggtgcgttgccgccgagctccagtgagaccttcttgatatctttcgcgcactgttccatcagctggcggccaatttccgtcgagccggtaaacgagagtttgcgcaccagcgggttaccggtgagctcattgccgacttcactggccgaaccggtgaccacgttaaacacgccctcggggatcccggcgcggttggcgagctccgccagcgccagggcggagaacggggtctggctggcgggcttgagcaccatcgtgcagcctgcagccagcgccggacccgctttacgggtgatcatcgccgagggaaaattccacggggtgatagcggcggttacgccaatcggttgtttaatcaccagcagccgcttgtcggcctgatggccgggaatggtatcgccgtagatgcgcttgccctcttcggcaaaccactcgataaaggaggcggcgtagctaatttcaccttttgcttctgccagcggtttaccctgttccagcgtcatcaggcgcgccaaatcgtcctgatgctccatcatcagctcaaaccagcggcgcaggatagcggagcgttctttggcggtaagggcgcgccatgcgggcagcgcgccggcggcggcatcgatagcctcgcgggtttctgcggcgcccattttgggcacgctgcccagctgctggccgttggcggggttcgtgaccgcaagggtctctttgctgctggcgtcgcgccagcgtccgttaatcaacgcctgctggcgaaaaagggtagggtcgttaagttgcatggttgcgtcctgtcgtaaactgttttagcagtgaatgcgtccggctcggctgggcctgccgtttatagaagctcccggcagacgcagcggcatcaaacacctgtccctgtttagtgtagacgaatgcgttcagagaaccgggagcaatgctgggtgatacaacaataaccacaaataatttacggatatttgaactggcagaacgttattgtgcaaacaatgctgtattttttatgctcaatccgcaagaaaggagcgctctatgtcacagcaagaacggttttgtcaggcctgtggaatgccgatgtccgccggggaggcgaaaagcgcaagcgacgagtactgcgcctggtgctgcgatagcgaggggaagcttaaatcctgggaggacgccgtctccggcctggccgagttcctcgattcctggcagaaggtcggccccgcggaagcgcgcaagcgggcgatgcgctacttaacggccatgcccgcgtgggcccataaagcggaagagtaacccgcagcccggagcgcaacactccgggcttttttagcgcgatcagaacttccaggagacgctgccgacgatactgcgctctgcgccaaagtagcagtaagagagcgagttacaggcggcaacgtagctcttgtcggtcaggttattcacgttcagctgggcgctgaggcctttaattcccaccttcgacaggtcatagccgatcgccatatccaccagcgtataggacggcagagtgtgcgtattcaggcggtcgctggtaatgccgttgacgtagcgcacgccggaacccagcgtcaggccatccagcgggccgcttttcacatcatagctcagccaggcgctggcctgattgcgcggcgcgtaaacggcacgcttgccttgctcttccgggctgcttttcttatagcgaatgtcggtgtaggtataggcggcctgcaggcggaagctatccgttagctggcttatcgcctccagctccacccctttcgactcaatttcaccaatcgaacgatacggatcggtcggctcttctttggtggcgatattggtctgattgatgcggaataccgaggcgctgaactggctgttcattccttccggctcatacttcagcccggcttcccactgcttgcctttcatcggatccagcacgttgccgttttcgtcggcgaagctggtgggcgtaaaggcggtggagtagctgatgtacggggcaaacccgttatcgaacagatacagcagcgcggcgcgggtgctgaagttgttcttatccagatcgctgcgcgtttgattaagcttatcgatgttggagacgctgacctggtcgtagcgcccgccgagggtcaaacgccagcgctcccaggacatttgatcctgtaaatagtagccggtctggcgcagcttgtgcttctcgcggctgtacatggtgatgtaatccggcttcgcgccgtagaccggattaaaagcgtcaatggccgggaatgcgccatagtagccggtggtgtcgttgctgcggtcctgatagtcgatccctatcagcaggcgatggttaacggcccaggtatcgacgctgccgtcgagctggttatcgagggtgatggcgttcatcttttcgtccgagccggaatagccgcggttcagctcggtttcgttcagccagcccgcggcataaacctgattcagctcgactttggtatgcaggtagcgcagcttctgccgcaccgaccagccgttatcaaacagatgctcgaagttgtagccgaccatattttcgcggcgatcgtacttgtcgtagtcatcttctccctcgaagaaggtgttagcgattttcttgccgtagtgcggcaccacggtaccttcataggggaggcccgagtggctgccgccctccgggtcgcgatgcagataggccattaaatcaaggcgcgtctggtcggtgatgcgccaggtcaggctgggcataatcgcgtagcgctgctcttttaaggtatcaaactgcgagtctgcatagcgggtcatgccgcttaagcgcgccgccacgcgatcgttatcgtccagcgccccggtaacgtcaaacgccgccccgcgctggttgttattcccggcaaacagcttaatttctccgccgggatcgaatgagggtttacgcgaggtgagggcgacgatgccgccgggcgaagagcggccgtacagcaccgaggccgggccgcgcaccacttcgatattttccaggaaccacggatcgaccaccagcgagctgtgcgagttggtatcgcccatcattttcaggccgtcgagatagacgttatccaggctgccgtcggagaagccgcgcaggacgatatagtcaaagcggttggaggcgccaatctggttgctgtaaaccccgggggtatagctcacggcctggcggacgctgatcgcgccctgttcttcaaactgctcgcgcgtgataatagacaccgattgcggggtctctatatccggggtggcaattttggtcgcgccgctctgcatctgcgaagtgaccacgatggtttcgttttttgttgtttcctgggccagcagcgggaaggcgacgccgccggtcacccatcctaccagtagcgccaggcgagttttcgcaaacatgaacatctccaaaggcatttctaattgttaataagaattattacctttttgatgctgtctatagctatgcgcaatgccaggatacgtatgcgcgctgccaaagccgctgactatttttcgcaaaaaggggaaaaatggattagcccggcttttgcacatcgcagggcgagatgccgtagcgccgacgaaaagcggtagagaagttggtggcgtgctggtagcccgacatccaggccgcctgctgcacgctatagccctccagcagatagcttcttgcccgcgccaggcggcaatcgcgcaggtagtcaaaaaccgaacagccgtaggcctggcgaaacttactgcgcaagctgctggagctcatcgccgcccgctgggccagctcattgagggtgtagtcgttttccggcgcctgctccagcaggcggcgaactctctccagccgctgctgttcgccgcccgccggggcgacgtgcttcgcgctttcatcctgacagacgctcagtccatggccgaacagctgcaggataagcccttccagcatcagctgtcgggacacgcgactcagcgcgctctgctgcgcgtactgcagtccgctcagcagaaaacccggtatctgccagataagcgttggcgtctggcacctttcccactcgcgcatcaatgaatcgagcaggccatcgcgccaggtgccgtccgggtagagtccgagggagagcgtacggagccggctgtcggcatcgtggcgggcgcgcatggcctgatgttcgctaaggcgcgaggtgaaggccatcccggaacgcaccaggtgctgctccccgttgagggtcagcgcgacgcagccttccagcaccaccagcatatagagcgggctactgtggcgggaggtggtctcataaggctgcaatacgtgaacatcagaatgggtgacgcacatgccgcagggcagggtcatctcttccacttctccccgcagcaccgggctggcgtgcggaggctccggcttttgcagcagctgcgggaagcggtagtcgataccgtatcgttcaccaaacgccataaactcgctgacggagaaggttttcctcagcgcctggcgggcgggttcgttctgcgtagttgtcttgttcatgcggttttcggcaccggagagggcgtcatcggatgacgtcaccttatcactgcgcgggcagggcgacaataaagatgagaatcattatcaacttttgcgctgcggcacagaaggcgcgcggacggccgctatccgtgcgccagcggcagggatcaggcgtcagcgttgtccagcggccaggagtcgaacaggtagccgtcgaagtagatatcatcgacgttggagaactccagcaggcggcgtttgacgttttccagatgctgccacatggcaagcttggccgcccgggcgtcttttttgattaaggcggcgaggatccgtttgtgatccaccagccactcctgacggtagtgggtatcgccgagatggcggtgcagctggatccacatggggttattttcccgccactgccatgactgcctgaacagctcgaccagcatactgttgtgggtcgcttcggcaatggccagatgaaactgcatatcgccgctttcggagccgcccggcgcgctgctggccagctcgcgctcttccagctgcaaagcctggcgcattttgatgatatcttcccgggttgcctgcagtgcggcaaattcggcgatattgctctccagcagctggcgggcctgcagcagttcaaacggaccggcatcattgcaatgattgatgtccgcgctctccgccgcgccttctccgacggcgttatcgagcacgtagatcccggcgccgcggcgcacttcgaccagccctttaatctccagcatgatcagcgcctcgcggaccacggtgcgggtcacgtccagcatctcggcgatttcgcgttccggcggtaagcgatcgccggggttatagggcgtctggacgatcagattgcggatcaacgcgccgacttcctgatagggtctgtgctgagaagtttgtgatttcatgatgttatgttgtgagatgcgatagcccggtggctgactatagcatctggccagggggttggcacctccccttgcgcggagagtgggaaaacgggtcaaccacattggtgttcagttgacccgtggcaggacagagcgttacaggccgccgccgagcgccgcaacgcactcgcgggcgccgcgttcgcacagcgcgtggtaagcctgcgtcaccgccgcaataaaatcgctattgtccggcagatcgtgggcaaaaattccgcttaacgccagcagcgcggcgacgcgttctgcaccctgaaaacgctggttgatctgttggatctccgccagcagcgggtcgacgacatcaataggctgcccccgctcgtcgatgccctgggtatagcgcatccagcccgccacgccgagcgccagatggcgccagctgctgccgttttgcagatgcaaacggatgggatccagcaggcgctgcggcagcttctggctaccgtccatggcgatctgccaggtacgatggcgcagcgacgggttgctgaaacgggcaatcagcagcgtggcgtaggcctggagatcggtgccttccggcatggagagcgtcggcgcctgctcctgcatcatcagggcgaaagccgcttcacgataggccgggttggtcatggtatcggcgatggtttcatagccgccgagatagccaagatacgccaggaaggagtggctgccgttgagcatccgcagcttcatcatttcaaacggcacgacgtcttcaacaaactgcgcgccgactttatcccacgccgggcggccgctgacgaagctatcttcaatcacccactggcggaacggttcgcaggcgatggcgcacggatcgtagaccccaagctggtcggcaatctcctgcagcgtttccggcgtcgccgcgggtacgatgcggtcaaccatggtgcacgggaaggtggcatgggcttcaatccacgccgccagcagcgggtcgcgcgcctgggccaggccaagcaccgccactttcgccacgtggccattctcgcggacgttatcgcaggacatcaccgtaaaggcctcaagcccctgttcacggcgcaggcgcagcgcttcgacaatatatcctatggcggatttcggcgtcgtcgggttggcgaggtcgtgttgaatcagcgggttgttgagatcgagctggccgctggccgcatcggtgcagtagcctttttcagtgaccgtcagggagacgattgccgtgtgcggacgcgtcatggcgcgcagaatgccgtcacagccgtcgatttccggatgcagcgcctctttcatcgaaccgataattttcagcgcggtgctgtcagcgcctttttccgccaccgtgtagagcagctgctgatttttcagctgttcaatcagaacgcgatcgttgcccggcatcaggttgacttcgcagatgccccagtcgctgtcgctggtttccagcagatgatgggtataaagcgcctgatgcgcgcggtgaaatgcgccgcagcccaggtgaacgatgcgggattccaggcgagaacgatcccacgcggggcgcgtcaccggcaggttgctgtcggcaatggttgcagtcatagcaaactccagagtgggccgcaaaaggcggccgaagaggtaaaggcgggacgtcggccccgccagtcaggaattagcggctaaaaaaagcgcgctgaatcgccagctcgacgccgcgaacttcagccagccctttcaggcgaccaatcgcggaatagccggggttggttttctttttcagatcgtcgagcatctggtggccgtggtcaggacgcatagggataagatcctctttgccttccgctttacggcggtgctcttcttcaacaatcgctttcaccacttcgtacatgtccacgtcgccgtgcaggtgagcggcttcgtggaacgttttcgggttctcttcgcgcagcgtagagcgcagatgggtgaagtaaatgcgcgggccgaactgcttaatcatatccacaagatcgttgtcggcgcggaccccgtaggagccggtgcacatggtaaagccgttagccatgctgttcaccgtgtcgaccatccactgcatatcttcaatggtcgagacgatgcgcggcaggccgagaatcgggcgcggcggatcgtccgggtgtaccgccatacgtacgccaacctcttcggcgacggggataatcgctttcaggaagacggcgaaattctcgcgcagcgcggctttatcaatatctttataggtggcaaggtgctggcggaactggtcgagggtatatccctcttccgcgcccggcagaccggcgataatgttgcgggtcaggcgcgctttatcttcatcgctcatggcggcgaaacgctgattcgcctgagcgacctcttcggcggtgtagtccgcttccgcgcccggacgcttgaggatatgcagttcaaaggcggcgaattcaatttgatcgaaacgcagggctttggagccatccggcaggacgtattccaggtcggtacgggtccagtcgaggaccggcataaagttgtagcacacggtacggatgccgcattgggccagattgcgcaggctctgctggtagttagcgatccacttggcgtagttgccggtatgggttttgatctcttcgtgaatcggtacgctttcgaccaccgaccataccagcccggcggcttccacgatggctttacgcttgaggatttcgtcaaccgtccacacttcaccgttcgggatatggtgcagggcggtaaccactccggttgcgcccgcctgacggacgtcagctaaagtgaccggatcgttagggccataccagcgccatgtctgttccatgcttaacctctttcacgttattgacctgcttcaggccgctgctttgatggtagcgtcggttccggtcaaccatcgtaacggaggggaaaccagacgatatggcgtataaattcctccaattggtcgaacatgtcaaccatgaatggcaaattggtaaaccaaagtgtgacggagatgcgtgaaggggagggaacgttaaacagggcggcattgttaaaccgccacggggcgcgggctgattctgctggcgttagtgttaagcatttttcatgtacttcaagagattactcagaaccggagaagtggaattcttcatgggcatagggccagtgcgcggcgggtagcgatgtgttgcgaaatggttaaccaatgtgccaaacctatcgaccagaagaacggaggcggtcattgataccggccggagcgcgtacggactcgcagcagatcacactttttgattattacgatttccatataaaaactacgtgttatcattccgctggtaaataccttttcaactctcaccgaggctttgatgctggagaatgtcatcatcagataatcagcttcccgaccttttcaggccggactggttatcgctgcgcttaaaccttacgcgaacacctgcgggtgttggctcgtttttacgcatgatgattaacaggtttcttcagtatgaatctatcccgtcaggaacaacgtaccttacacgttctcgctaaaggtggccggatcgcgcacatccgcgatgcatcaggccgcgtcacctctgttgaatgctacagccgcgaagggctcctgctcagcgactgcacgctcgccgttttcaaaaaactcaaaaccaaaaagctgattaagtccgtcaacggacagccctaccgcatcaataccaccgggctgaataacgtccgcgcacagctggacaatcgctaaggagcctctgatgacaaaccacagcttcacttttcatgtcgcctctgaaggcgataccgatgacattctcgacgtcgaaacccgggctttcggctacagcaaagaggccaggctggtggccgatttgctcaacgatgagagcgcctgcccgacgctatcgctgctggccaggcataacggagaggcggttgggcatattttattcacccgggcgacgttcaaaggggagccggactcgccgatgatgcacatccttgctcccctggcggtggtgccggaataccagggcgtgggcgttggcggagagcttatccggcacggcattgagcagttgaaagcaatgggaagccagatggtatttgttctgggccacgccgcttactaccccaggtacgggtttgagccatgcgcgggagataaaggctatccggcgccttatccgattcccgcggcgcataaaggctgctggatgctgcagccgatttcgtctcagccgctgggacgaacgggccagatacagtgcgcccgggcgttaatgaaacccgagcactggcgcgagtaatcaataaggagatgatgatgactattggcacgattattaccggttccaggcatatcgcgttgtcatcccgggagcgcaaaatcccctgggatgaaccggcttttagccagcgtatgctggagaaccatctgtcgcaggagcacgactgggccagccgcaggcggtcggttatcgaacaacaggtcgcgtggattgccggacagctacccgccggcgcgcgcattctggacctcggctgcgggccgggcttttacacccgcctgctggcggagcgcggcttttactgtacgggcgtggatttttcgccggcgtcgatcgcctgggcccggcagcaggcgcaggcggccgggctggatattgcctatcaccagcaggacgttcgcgagtacgcgccggaaacccagtttgatttcattatgatgaccttcggtgaactgaacgtgttcagcgcggctgaggcccgctcgctggttcatcgctgcgcgcagtggctggttccgtggggaaagctgctcatcgaggttcatacctatgctgaagttaaacgtcagggaatggccgatcccggctggcagcgctgtccgcaggggctgtttcttgatgttccgtacctgctgctgacggagcacgcctgggatccggcggctcaaaccagctccacgcggtttatggcgattgaagagagcggcaaggtgacgcgcttcggcagccggatgaccgcctggcacgatgacgcttatctcgacctgctgcgcacggcgggtttgaccaccattacccgcccggatgaggtggaatggccggtcagcgaaacctttaccggcaagctgtacgcgctgctggccgaaaaaaacgttcccgattctctttccgcaaaacccataaaaggaattcaaccattggatattccacgtattttcaccattagtgaaagcgctcaccgcatccataacccgtttacgccggaaaaatacgccgctcttggccgcgcgctgcgaatgaaggccggaacccggatactcgacctcggcagcggatcgggggagatgctctgtacctgggcgcgcgatcacggcattcgcggcatcggcgtcgacatgagcgcgctgttcagcgagcaggctaagctgcgggcagaagagctcggcgttgccgaccgcgtgacgtttattcaccaggacgccgccggttatgtggccgaggaaaaatgcgacatcgccgcctgcgtgggcgcgacctggatcgccggcggcgtcgccgggactatcgagctgctgagcaaaagcctcaagcccggcggtatgctgctgatcggcgaaccgtactggcgccaggtaccggcaacggaagagatagcacaggcctgtggcgcctcttcgctcgccgactttctgacgcttgccgatctggtctcctcttacgatgcgcttggctatgacctcgtcgaaatggtgctggcggaccaggaaggttgggaccgctacgaagcggcgaaatggctcaccatgcgccgttggttagaggaaaaccccgatgatgagtttgtgccagaagtccgggcggagctgacgatggcgccaaaacgccatgcgacttatacgcgtgaatattttggctggggcgtatttgcgttaatcaagcggtagttgaaagacccggcatagcaggaaggctatgccgggatcaggggggcagaacggcaggaaagggcgtccctggatgttctcttgtcagtttacgcattgcccaggacagcagccggttagcggcgaactggccatattcattacgttttcaggataatttcttggggatttctggcactgaatgcacgtcaatttgactctgcgtactccctcgctaattatttttttccgggctcacaaccatccagacagcaatacctataatgatcgccccgataacaaaaccattgttaacggtttcgttcagtaccatgtatccccatagcacgccaaatggaggaattaaaaaggtcactgttaatgaacgtaaggggccgatatcagcgataagccggaaatagagtatgtaggcaaatgcggtacagatcgctcctgcggcaatgacgcttatccatgcctcttgctgtaaccagttaacggtcggtccactatgggtgctccatataaaaaagggtagcaaaaaaaaggacgcacctatctgactaccgaaggccacgattttaggatcgagtccacctttgtttgaaatccagctacgcgtcagaaaaccggcggtcgcatagcaactggtcgcgatgaggcaggcaataacgacggcaatttgtttctcagctgacaggggttcaccaattgtggcgatcgcgatgatcccgacaatgcccaggagcatgccagcccattttctgaaggttaatttctctgcaaaaaatgcaaacccaatcaccgcccccatcaacggcgttgttgcattcagaatggctgaatacccagccggtaaccatttggcagccaggcaatacatcaggaagggtaatcctgaattaatgacgccaagcatcactgaggacttaaatttatctttaaagtcaaaagaagatttaaagataaataaaataaccgcgaggcctgtggaaccaaaaaagacgcgcaaaaaagccgtgttaatagcgccaaactgcggtacggctatgcgcataaagagaaaactcgcgccccagatagcggcgagcaacaataaccgaagataatcagcaatgcgcatagcggttccttttatttgaatgagaagtcacaacgcaactgtgaaacagggcgggcgtactgacaaacaagatttttgtttatacttaagcttttctaattcatgaagtcgtgtagccgatgaaaatgccacctttacacgcgcttatgtgttttgagtctgcggcaaggctgatgagtatgaaagcggctgccgatgagttatgcgtaacatccagcgcggtcagccaacagattgcgaagctggaaagcatgacgaacagccggttgttcatccgtagtcctcgccgtctcgaactgacaaccgaaggacgcatctatctgcgggcgataaggccggctttcaatcagatagcagaagcaacacagcgcttaatgaatgaaggaaaggcaaacaaagtgacggtcagttgcacaagtggttttgccatccaatggctcctgccgcggctgcctgcatttgaaaaagccaacgcgggcgtggaagtgcaaatcagtacaaccaacaggcaggttgatttactgtctgaagggattgatttcgccatccgacacggggctggtgactatcccgggctggagtctgagtgcctgataaacgataaactcctcccggtctgtagcccccggttaatcgcatcagaggacgagctctcatcaccgggcgatatggctgaatacacgctgctgcacgatgaacaccggctggactgggctctctggtttcgtgctctgggtattagtaatttgaagacagacacggggcccgttttcatcgattccaacggcgtgattgaggccgcaatcgcgggcaaaggtatcgcgctcgtgcgcagttctcttatttgtgaagaactgaagagtggtttgctgattaacccgctaaaaataccggttgatacgccgattgcgtactatctggtgtacgacgagtccgcggtcttgcagaagatatgccggcgtttccgtgactggataaccacgaccgcgaccaaagaatttcccgcgatagacaagagggctaaataaagaagctgactccagttctgtccgtactctctctgaatcccctgtggcgtggggagtaaatggggagatattcgtctccccgctgaagacacgttgctgctcgaatacagcagacctgacggcggcagcccgttttatcagaatttgacggtcacctgattgccgagcacccaggcgtttttaatctcttcgcttcctcccggatgaacgagcagctgcaggttagggcgcacggtcagccatggcgtcgcgcgaaagctataatgcagctctgcggcatactcggctctgcgaaccggaacatacagagggttatcataatcatcgatcccccgcatctggttcaggagctgcgcccgacgggcgactctgtcgttggcgtgcattttactgacgccgaagctgataaagtcctgcggacggctggcgaaagggccttgataaatggcgccggcctgaatctgatagtccattgtcgccgtatctttatcattcattgccagatgcccgaaaaggctaaggccacgttggcgctggctgctcgagtaggtcagctgctggacgacatagagataacctccgtagcggccgtcgtgtcgccgggcggcctggtgcgtgagcacatagggatcgccattgtcatcatccagcacatcattggcgtccgccgtgttataccatcccccgagtttccagatgccggggagttttgccgcgccgagagtaggtctatatcccagttcaaaaaggtacatgtaccccagatgcccggtaccatccagctggaagcttccgtggcgggtggcgtaggcaggattgtactgaaacgcgccggcctggacgtaaagggctggggcggggctgtatttaatacggccgccccactggcctatgggggtgttataccagacgccgctgccgtggccagctaaagagccgcacagcgacaggttttgaaaaaagcagccgttgttatcaaaatcctctcccggcggcatcaggcccaccttgagatccagctttttatcccacccggtttttttgaaccaaaactgcgtcgcgtgccatgtttgcccccgaccgtagttgctctgaacaccggagcctattaccggcgcgcgcggatcctgaaggcgatcctgagtcagatctcgcccgttacgattattcaccgacgctttaaattcaccgtcgtgaatacctaaaatcttttccagatccatatttacgccgagaatatactggtcgctgtagcgcagggttttatcgcgatcgtaaccgccggagatattcgtggccgtcattgcgctatattccagcgtaaaatcataaccatgacggcgcagatccgtacgcacgcctccccattctccggtcatgttttttgcggtgggagaaaaaagcgtctcgttggccagcgtctgtaaagggtgtagtaaagccagcagcatcgtgccgctgtggatgagtttgttcatgtttttaccgcctgttaatgatccaggtctatgaataattcccggtaaggcgcagctgaatcagccgactgcgccgacctcccgtcagaggtggccccgcgcttcccggagccacaggccgtctatggcgacagctcttctaacgattttcctttggtttcaatggcaaaaagccaggtaattaagccgccaatcagcgcaatgaccgcgaaagtgataaacacaaagcggatcccgaagccgctgacgataaaaccgaccatcagtgggccgatggatgaccccgcccggagccatgcgctggaatacgcggtgccgatagcgcgcagtcgggtgggataaagctctgccgcgtacagataaagcgagaaagcgatggtctgcagaatggcgtaggtcaggctgcccagaatcagaatttcaacggcggatttcgcgcccagaacggagagcgtaatcagcggaacgatagccagtaaaaaggcccatgtgtaccagcgtttgcgcccgacgcggtcgatcatcaaggcgcagatcactgaagccacgacgccgcaggaagaggtgatccagccgtaggccagactggtatcgagggagaggttaaaccaggttttgtagagggttggaaaccaggtgatcattccgttgttgacgctataaaccgtcagccacagtccccagagcataaaggtgcgggatttatagataccgccaaagagggctttaaccccttccggagccgctttttgcaccgcgggggcttttatttccggttcgggcaacgtcatcccgcgcctgatgacctctgattccagcgtcgatacgatgctgtccgcttccttcagcctcccttttgctgtcaaccagcgcggtgattccggcatgagccagcgaaggggaacggtcagcgcggaggggactaagccaattaaaaacatgaccttccagccatagatgggcaccagaaaataccccaccaatccggcaaacatcatgccgatagggaaaatcacttcatacaacaaaaagaaacgcccgcgctttttggcaccgacaaattcattgatataggcgctggcaacggggacttccgcaccgatacccaccccctgtaaaaagcgaataacaagaattgaccagccgttccaggcaaaaaggcaggccgcatccatgagtacgaacatgatgatggtgatacgcaatacgccgatgcggcctattttttccgccagcgagccgaaaaacagggcgccgcacagctggcccacgtagctggccgcaataataagaccgacaaacgtcggcgtgagaccccactcctgggtaagctgggggagcgcaaaagcgatagcaataatggtataggcatcgaaaaacgtcgataagccgacgataacgcggatcgctttcagccgtcgggtgatggggaggcgttccagccttgccagcagcgcgtctggcgtggacgccgttccgctggcaacggcgtaatctgaagcaatggcctgagttgacatagtattaccctgttaaacgttgtctggggcatacacgtaaggttctgaataaccacagggcaacgaacccttattcatcgacgtgctgcatataatgctgtcctgatgtgtttatgataacgttactgcaatcgatttcacttgcagctaatcctttgctggattcgccgctaagtcaattacgcctgttgtataaatgtcgagcagttcacaatctgaaaaaactcacgcgcaaaaaggcgaagcggtgaatgcaaagcaaaatggataagaaatgtgaattaacgacctcccgaatgaacccggcaaagtgaagcaccattccttttgtccgggcgaggtttgacgtaagatcctttaaccccacggtttgcacgatggtatccgttgaacgggcaacacggatttttacccgcattgatgagttggagcagcagatggatcaagaaagtgaactgaacgatttgccggaaaaaaagctggcgacaatgcgggatgttgctcgcgctgcgggcgtgagcgtctcgaccgtttcgcgcgtactcgatgaacggttacccacctcgcgcagcgcctcggcagagaaaattcgccaggtggcccgtgagctgggctaccgtcgggactatgttgcttccagcctgcgccggggcgataccggaacgcttggcgtcctggtgccgaggctgaccgatgccgttacggcgatgcttttcgaagagatagccagggcggcggccaggcgaggctatttcgcgatcgttgcgacctgcggtgatagcaaggatcaggagaaaaacgccgtggaatcgctgctggatcgccgcgtggatgggttgatcatgtccacctgccggctggacgatcctttgccgcaaaccctgcgtgaacgggatgtgccccacgttctggcgctgcgtaccgacggttttagcccctcatcggtcggggacgatgagcttggcggctatctggctacccgacacctgattgatttaggccaccgcgatattggcctgattggcggccctgattttgcctccaacgcgcgcaaccggcgtaagggctttgagcgggcaatgcaggaagccgggctcaggatcgaagcggaatggtgctgtcattcagattttaatatcgcctcgggggagcagcagggaatgaaaattctcagccagcctcatcgcccgagcgcgctatttgccgtcaatgacgaactggcgatcggcgtcctcgcggccgcgcaccagcaggggctggtgattggcgaagatctctccctggtcggctacaatgatattcccctggtgagcagactgcccgtggcgctgacctcggtcagaacgccgctggagcatatcgccagcaatgcggttgatatgttattgaatccagagataaataataacatgcggattaccacgccttcccttattccccgtaagtctaccgcgtctccacgtaaataatccccctgtgatcctccccgactttccaggagaaagcggggagggttgaattttgtataacggatctcatcccggatgcagatcgcggtttagtttgtgatctgcgttgcatttttaaccaacatggcgttgacggttttatttttgaggttcaatgtcaacgtcgtgaaaacgattgcagaaacgatttcacttccgtttcaaagaatcgcttaaccgtaaacaaatgcttactcatcaaggggatatttatgattaacatcgatctgagaggtttgactccggctccggttacacccttcactcgcgatggacgcgtagactatgatgccattcagcgcctcggcagctggctgggcagcatcgacggggtgaaaggtctggtggtgctgggacacgcaggggaggggacttttctgacccaggaagagcaggcgaatgtgatccgcgcgtttgtgaagtccgtggatgataagcttccgatcattgccggcatcaccggggaagggacggaagtggctgcgctggaggcgaagcgcgccgttgccgccggcgcatccgccggtttgctctatccttcccacggctggctgcgctttggctatcaggatggcgcgcctcaggatcgctaccgcgtggtgtacgaagaaagcggcctgccgctgattcttttccagtatccggatgtcactaaagccacctacaacctgaaaacgctgctggatatctccgcgcagccgggcgtatttgccatgaagaatggcgtacgtaatatgcgccgctgggataccgaaattccggttattcgccgcgagcgtccggatctgcaaatcttaagctgccacgatgaatatctgctgcataccgcctttgatgtggatggcttcctggttggctacggcaatatcgcgcctgagccgttaattgaaatgattaaggcgggtaaagcgggcgattacgttaaagcgcgtgagctgcacgaccgactgctgccggtgaccaaaagcgtctaccaccgcggttcgcacatggaaggtaccgtggcccttaaacatgctctggttgcgcgcgggatccttgaacatgccaccgttcgctcaccgctgctgccgctcgaaaatggcgctgaaaaagagatccacgacgccatgcgcgccgctgagctgggccgcgtcggttaatttattctgcgtctgttgttaatccgcaatgcagaaatatcgcttactgtattgcggatcatcggttacttcgccccggtattttttgctgctcttcatcataacgtcggggctttcacctctgtatattgctgggtgatttatgaaactattaagctttcgcgttaatgataaaaacaaatatggcctggcgaccgctgacggcgtcatcgatctgcaggcgcggtttcctcaatatagcagcctgctggaatttataccgcatcttcatcttgttgatactctgccgccgtctgcgaaacaggcgaactattctttcgacgagatcgctttcctgccggttattactgaaccgaaaaaaattatctgcgctggcgtgaattatcgcgataaaaacgctgccggtaacgagaagccctctaatcctgtgctattcatccgctttgcggattcacagaccgggcatctggcaccgctcctcaagccggaacgcagcaatcagtttgactatgaaggcgaaatggcgctggtgatgggccgtggaggacgcaatataccagagcaggaggcgctgcattatgttgccggctacagctgctatatggatggctccgtgcgcgactggcagcatgcctgctttaccggcggcaaaaactggccagcgacgggcggcttcggcccctggctggtgaccggggacgctatccccgacccgcaaaatctgaatattactacccgactgaatggccagacggtgcagcaggataatacgggcagcatgttgtattcaattgccgaactcattgcgtatatcagcaccttcagcgcgctctctccgggagatgtcattctgaccggcacgcccggaggcatcggaaaaaaacgtaccccgccgctctttatgcagcccggggacagggtggaagtcgagattgagcagatcggatgcctgatgaatagcgtgcgcagcgatgccgcggtagcgcgataagttatcgttttgtatctaaaaacagggtgagagcgcgtttgcccggcggccaggacttgcaggccatttaatcatgtaaagggttaatgccggacagggagccgtggaggcaatatatgatattggttcagtttctggtggtgctgctgtttctgtacatcggcatgcgggtcggggggatcggcgtggggtttgccggcggcgccggcgtgattgtcctcagcgcgctcggcgccacgccgggtgatatgccgatgctggttatcgtatttatcatggtggtgatcgtggcgattgccgccatgcaggaggccggcggtattgaataccttgttgacctcaccgagcgcctgctgcgccgctatccgcgattgttagtcatcaccgcgcccctttccacctggctattaaccatgatggccagcaccgggcaggtctcttttgcctgtatgccggtgattgtcggcgtggcgaaagagaacaatataaagcccacccgggcgcttgctctttcggtcggcgcctctttgctgggcattgtggcgtcgcccatttctgcggcggtgattttcttctcggggattctggaaaagggccattctggctggggctatattgagcttatcgcggtatcaatcccgtccacctttctggcgctgctggtcacctccgttttttacctgtgctgggacaggatccgccagcaggatcggctcaatgacaatccggttcaggtgcaggcaaggactgcgcgggcgatcccgccctgcgccggtcgttcggtgctgatttttatcgtcgggctggttgtggtgctggtttatgcgattgtcaccagtccgaaactcgggctgattgcccatccggtcatgagcagcggacaggcgcgggtaggagtgatgatgggcgttgcgctgctgattgtggtgtgctgccgggttaacgtacacaaggtcccgtccggctcggtgtttaaaaccgggatgacctcctgcatctgtattctcggcgtcgcctggctgggttcaacctttatggacagtaatcaacagtggttgcaaagcgcggtctcgtcacacttgctggattcgcccatgatgctggccattattattatggcggcctcatgcttcttgtattctcaggcggcctccacaaaaattttattccccgccgcgctgagtatgggcgttgccccggctattttggttgcctgcttcccggcaacggcttctctttttattctgccaaactatccgacgctgctggcggcggtagagctggatgataccggctccaccagactgggccgacatattatcgatcacccttttctgctgcctggcctggcatcggtcctgctttcaatgctcttcgccgcggggctggcttattggattcagtgaatcgcctgaggcttttactttgaacacatccgaaaacaaagcggttcaccgtcggtgaaccgcttttttcgatatcaggctgcaagatctttcatcacctgaataaatgcctgagagacagattcttctttatggtgatgcccatcctcaatcacccagcgtccgccagtcatcaccgcggtaatgggattagatgagcaggcgaagatccagcggttgagcagcatctggtcttctgcgctggcgataaagggattctggctatccaatacgaccagatcggcccgatatcctacgcttagctggccaatgttttggcccagcgctctggcgccgcctcgtagcgccccttgatacagcacgttgccgacgtgaggctcgcctgggacgatgagccggttacggcgctgggctatcaggcgctgcccgtattcgaaccagcgtaaatcctcgctgacgctgacgctaatgtggctgtcggaaccaattccccagacgccgttatgctccagatattgtgggccagggaatatgccatcgccgagattggcttcggtggtcaggcacaggccggccaccgcaccggatgtggcgatcttcatcgtttcctgaggcgtcagatgagtggcgtggatcaggcaccagcgcgaatctacggggagatggttgtacagccactccaccgggcgctcgccggaccaggccaggcagtcatccacctctttttgctgttcagcaatatgaatatgaatcggttgctggccagggtggcaggccagaatggcgccaatctgctccggcgtaacggcccgtaatgagtggaagcacagaccggtacgctgcattggctcgccggccagccgcgatgtgagcgactcgtacattgtcaggtagctgtcgctatcgttgataaagcggcgctgtccaacggagggcggctgcgcgccaaacccggcgtaactgtacaggacgggcagcagcgtcaggccgatgccggtatgtttcgccgcgctggcgatacgcagcgctaattccgtccgctcttcataaggcgcgccgctgctgctgtgatgcagatagtggaattcggcgaccgaggtgtacccggctttgagcatttcgatgtacagatagctggcgatggtttccagctgttctggcgtaattttatctaccagcctgtacatcagatcccgccaggtccagaagctatccgacgggtttcccgccacctccgttaacccggccatcgcccgctggaaggcatgggagtgcaggttcggcatacccggcacgacgacacctttgatgcgcgtcgcctgcggattcggcgctgcgttcttttccagcgcggttatgatgccttcttcggacacggttatgccgacattatttgcccagccatcaggcaacagcgctttttctgccaaccagactgccattttaccaccttattatcagtgctaatgtatatacatgtacatatatatacatctaacaggtcatagagtaaactgacaacgtcagcatatgaggaatggttaatggcgcgtaacgacctgtcaaattcggattccatggatgagttacttgaacatcccgcccccttttatgaaagggtaaaggccatgatcaaaaccaagatccacagcggggcatggcccgcgaattaccgtgttccttctgaaagcgaactggtcacgctgtttggctatagcagaatgacgattaaccgcgcgttgcgagaactgaccgcggagggcttgctggtgcggatgcagggggtcggtacttttgtcgccgaaattcgcggccagtcggcgctgctggacattaacaatatcgctgacgaaatcgccagccgtggccatcgccaccacgccagagtcttcagactgacggaaatcgaagccgatgcccagcaggcattcagcttcggcatgcagcagggttgcggtctgtaccattcgctgatttgccattatgaaaatggcgtaccggttatgctggaagatcgactggtgaatatgcaggttgtgccggactacctgcagcaggattttacacgtatcacgccgaacgcctatctctcctcaattgccccgattgttgaaggcgaacacgttattgaagcggtcaacgtcacgcgggccgagtgtgtttacctggaaattgatgaacatacgccttgtctgctggtcaatcgtcggacgtggaccggccgacaggagaagaaaatcgtcaccagcgtgcgcctggtctatcccggtccgcgttaccgcctggaagggagcatgcgcaaatgatccgtctgctccctgccgggttgtatacggaaatgccctggaaaaacggccagggcatgacgcgcgaagtggcccgctatccggaagcgggggaatatgactggcgtatttccctggcgaccattcgccagcctggtccgttctccgcatttcccggctacctgcgcaatatcagcgtgctggaaggcggcgggatgtacctgacaatcgatgggcagcgcagcgcattgattgcgcctttccaggcgctggggtttaacggcgcgagcggcgtatcctgtgagattgtcggcggcccgctgctggattttaatgtgatttaccgggaagccgctctgcgggcgacggtgagctggtgtggggcaggaacgtggtcgcatcagggcggactgcggatattgtttaatgccgggcccgcgctgcgggtgagcgtcggcgaccaacgctatttactggaacattacgacagcctgctggtggatgaagcggtggcgctggttatcccggactctccgggcgcgcgtctggcccgcatcacgctgattcccctttaatcacgccgcaggctccttctgcggcgcctgttgtcactcctcttcgcacaatgcctgcagcatcgcgctgagttcgccctgatgaatcagggcgcgtagcgcatgtatatcggggtagagcagcgtatctttatcccggaacggcaccgcctgacgcactctctccagcgtcgcctcgctgcccacggcggcacgcagcgggcgatggaactccagcgcctgacaggcgcacagcagttcgatggcgacgatgtccacggcgttttctaccgccttaagcgctttacgtgcggcggcaacccccatgctgacatgatcttcctgaccggcgcaggtggataccgtgtggatactggccgggccggccagactgcggttatcgcccgccagcgcagcggcgacgtagggtgggatcatcatcccggagtaccccgaatccggcgagataagaaaggccggcagcccgctgagatgcgtattggttattcggtcgcaacgggcctgggaagcggtgctcaactgggcaatggcaacggccagcgcatccagcgccagcgccgttggcgcaccgtgaccgttgccccctggcatcacgataagcctgtcttcttctaccagaaacagcggattatcggtcaccgaattgagttcgatggtcataatctgccgacagtgggccagctggtcgcgcaccgcgccgtggatctgggggatacagcgtaaactaagcgcgtcctgaacccggtggtcgcgataacgcgccaggatctcgctgcctttcagcaggcggcgcaggttttgcgcggtttcctgctgtccgggatgagggcgcagggcgtgcaggcgggcatcgtagccgcgcgtattgccccgcatggcctcgaggcacatcccgcccgccatatcggcgacggggagcagacgctggaaatccgccacggccaggcagcccagcgcggtgatctcataggtgccgccgaccaacgcgtgaccctctctggggccgggaacatagggcgggatacccgcccgcgtcagcgcctgttgcgccggcagcagttctccctgataccagcatttgccctcgccgaagaccgcaaggccgatatgggctgtggcaatcaggtaaccgacggagccgccggcgggtgaccacggcgtgacctgacggttcaacatatcggcgatacgctgcgccagcgccggggtgacgccgctgtatccctgcagcagggattttaacgtcaccgccatcatggcccgcacttcacgcaccgtcaggtccggaccgactccgcaggcgtggctgcgcagcatattcagctgagtatccgtcatcctgtccggggacagccgggtggtgaccagatcgccgacgccggtcgtcagcccgtagattacctggccttgttcaatggcgcgctgaatacggctgctgacccgcgccatattatccagcgcggccttctccagcgcgatcggcgcgccgtcggcaatccgcactatctcatccacagtacccggtgcctgcccgagggtaatgctgccgttcagaggagttgtcatgtctgcgaccttattggctaaatccgtgttttaccagccactcatgcgcgatatcgtcgatgctgacaaattcggcaattttctcgttcatgtcgatcagatcttcagtcgttagctgagcagaaactttattcagcgtggtggtcacggcgtcattcagcgcttcactggcgacgattggcacaatattttgcgccgcgaacagatgttttgtgtcttccagcacgacaaggcgatcttttttgattgctggcgaggttgaaagcagatcggcgacctggacctggttatttttcatggcgctgagcgtcagcggcccgccgacgtccagcactttaaaactcttaaagttcagcccgtacacgtcgcgcaggccggagagcccctcatggcgggttttccattccgccgggccgcccagcaccagctggctggcaacaggctgtaaatcggcgatggttttcagtttatatttatcggcggttttctgcgtcacggccagaacgtcgatatcctgagcctgggagatctgcagcattttaactttctccggcagcttagcggccagctctctggcgacgtcctcactaccgtgtgccgcatttttcgcatccagatagctcaacagcgcgccgctgtattccgggatcagcgtgatggagccgtccagcagcgccgggatatacacttcgcggctgccgatgttcagctttttctccaccgggatgttttgcgcttctaacgcacccgcataaatggtgcccagcagttggctttccgggaagtctgcagaaccgacaatgactttcggcgcggcccaggccgatgaggtcgccgacagcagcagcgctgaacacagcgtcaaaatactttttttcatattcattgaggtatccttttgagcagtggaatgaggttatgggtttttaatacgccgggtaataccgggtgaaacgactattttttgcgagaaagagaacaagcagtcgatcagtaaagccagtagcgccaccagcatggcgccggcgatcatctggctgaaatcgttcgccgcgcgtccgtcaataatcagacgtccgaatccccccagcgagacataggctgcgatggtggcggtggaaataatctgcaacgtggcgctgcgcacgccggagaggatcagcggaagcgcgcagggcaactccacctgtagcaggatctgcagccgcgtcatccccatgccgcgagcggcatcaaggacatagggatcgagcgcgcgaatacccgcatgcacacccagcgcaatcggcgggagcgccagcgccaccagcaccagaatacagggcagaataaaggccatatcggactcaaactcgccggaaagtaaaatcaccagcagaataatcagcccaaatgagggcagggagcgcagggcgttggtggtaccgatgagcaggccttcccctttaccggtatggccggtgtagcagccgacgggaaacgcgatgataaaggcgatcgccagagcgacagcgctatagctgatgtgctgcgccagaagggggaaaatgccgccctcaccaaaccagtggatgggatccataaaccaggtaagcataattatcctctctgaggttgccagcggctgagttgacgagtggcgtaaaccaccagcatatccagcagcagcgccagaatgatgctgagcgcgatcccggcgatgatgggcgtcagaaattgcagctggaagcccagggtaaacagcgagccgagctgcggtgcgccgattaatgccgcgacggaaacgatactgacgttagacaccacggcaacgcgcaggccggaaccaatcaccggcacggccagcggcaggtcgatctggaaaaactgctgagcgggtttatacccgagcgctgccgcggactgacgggtatcggccgatacggagtccagcccgtcgcagacggtgcgaaccagtagcgcaaagctgtagatggtcagtgcgaccacaacattaatggggtccagaatctgcgtgtggagcagcgggggcagcagcacaaacagcgccagtgacggaatggtatagagtaggccaaacaggttaacgatcgccgacttgaccgatggcaggtggtgaatgccccagccgacagggatcgccagaattaaccctatcactaccggcacaattgcgagatagctgtgccagagaaacaggttgaagattttatcgctctgcgcccatagccaatcgaatctcatgctccctcctggcgcgtggatttacacatgtcgagtacttgatcgaggtggatggtccccagcgggatttgccgttcatcgacgatcacggcccggtggttgggcgagctcagcgcagcgtccagcaaatggcgcaacgggctcccttgctggtggaacgtcgcccccagattgatgttgtcgtgggtaattgctgttgccggctgatgggtgtcgaaccagccaaacgctttgccgttttgggtaaccagcagccagcggtcgatggccatctctttggcctgctcgaaggaacagtccagctcggcatagggctcgttgcgtaacccggtttctgtgtcggcggcgtggaaactcagtttgcgatagcctctgtctttgccgataaagtccgccacaaaggcgttttgcggcgtattgagcagttcgcctggggaggccatctgcgccagcttgccgccaggtttaagtaccgcgaccaggtcgccgagcttcatggcttcatcaatatcgtgagtgaccataatgatggttttgctcacctctttctgaatacgcaaaaactcttcctgcagctgttcgcggaccaccgggtcgaccgcgctgaacggttcgtccatcaacataaactccgggtctgccgccagggcgcgggcaacgcccacgcgctgctgctggcctccggaaagctgccaggggaagcgtttggcgatttgcggatccagaccgacgacttccagtaattccccggctctggctctggctttacttttggcggcgccgttgagaatcgcggtggtggcaatgttgtcgataatgtttttgtgagggaataaacctgcattttgaatgacatagccaatacggcggcgcagttgcacgatatccatttgctcggtggcttcgccgttaagcaggattcggcccgatgacggttccactaaccggttaatcatccgcaatgaggtggtttttccacagcccgaagggccgacaaataccgtaattttgccacccggcgctaccaggctaaggccatctactacgaccgaaccgttgtcgtagtgcttagtcacattctggaaggtaatcatcttcacgcctctgattgttgtgtgtggtgttcccgaatgcaggggagtcacgcgacaaaatgctgctatgtataatcttgtatgtacaactagcaaaacttgtgccactgccagagggatacgcaataagatggttatttagttattttaaaacaatcgcttatagtgtgtttgcgttatctggtactgccgtctatggcgagataagaagttatgacgagatagaaaatgcactagtgttatctttttgtgatgttttagtgcacaaaaataaggcagagagctgtatttttgcaccaaaatggcccatcatcacggtgtgttcacgagtgtatagcgcagcatgtccttctgtttttatgttaatttgttgaattttattggttttataaattaatttctaacctggcatccaatatgcttatcatgtatatacaattaaaatgcaaataacaaaactaacaattaattaacatatgacaggtaacggataagaaggtaaagcgcatgagtaaacaagcaacccgttttcgcgatgttgaaatcagagccccgcgaggcactaagctgaacgcaaaaagttggttcacagaggcgccgctgcgcatgctgatgaacaacctggatcctgatgtcgccgaaaatccaaaagagctggtggtgtacggcggtattggccgggcggcccgcaactgggaatgctacgacaagatcgttgagaccctgaagcagctcaatgatgatgaaacgctgttgatccagtccggtaaaccggtgggggttttcaaaacccacgacaatgccccgcgggtgctgatcgccaactccaacctcgtaccgcactgggcaaactgggagcacttcaacgagcttgatgcacaaggtctggcgatgtacgggcaaatgacggccggctcatggatctacatcggcagccagggcattgttcagggcacttacgaaacgtttgtggaagccgggcgccagcactataacggtagcctgcgcggacgctgggtgctgactgcgggtctggggggaatgggcggcgcccagccgctggccgcaaccctggcgggagcctgttcgctgaatattgaatgccagcagtcgcgtatcgacttccgtctgcgtacccgctatgtcgatgagcaggccagcgatctggatgacgccctggcccgcatcgcccgctataccgcaaaaggagaagcggtatccatcgcgctgcatggcaacgcggcggaaattttaccggagctggtaagacgcggcgtgcgcccggatatggtgaccgaccagaccagcgcacacgatcccctcaacggttatctgccgctgggcatgagctgggaagactaccgcgctcgcgcgcagtcccacccggtggagacgatccacgcggcgaaagcctcaatggccgaacacgttaaagccatgctcgccttcaggcagcagggcattcccaccttcgattacggcaacaacatccgccagatggcgaaagagatgggggtggaaaacgcttttgacttcccaggctttgttcccgcctatattcgtccgctgttctgccgggggattggcccattccgctgggcggcgctttccggcgatccgcaggatatctaccgcaccgacgcgaaagttaaagcgctaatacccgatgatgaacacctccaccactggctggatatggccagagagcgcatcagcttccaggggctgccggcccggatctgctgggtcggcctgggacagcgcgcccggctgggcctggcgtttaacgaaatggtccgcagcggcgagctgtcggcaccgatcgtgatcggccgcgatcatcttgactccggctccgttgccagccctaaccgcgaaacggaagcgatgcaggacggctccgacgcggtctccgactggccgttgctgaacgcgctgctgaataccgccagtggcgcgacctgggtttccctgcaccatggcggcggcgtagggatgggcttctcccagcactccggcgtcgtcattgtatgcgacggcagcgatgaagcggcggagcgcatcgcccgggtgctgagcaacgacccggccaccggtgtgatgcgccatgcggatgcgggttatgacatcgcgattgaatgcgccagagagcaaggactcaacttgccaatgattgcggactaatttctccggcgaaggggacaatgtatccccttcgcctcaccggagtgctgccatgaagaataacaacacaacatacatcgaaacacgttctattgaacccatccctgacggtgaacgccacggtagcatttttagccagttcaccctgtggctgggggctaacctgcaaatcaccgccatggtcactggcgcattaactattgtattcggcggggatgttttctggtcgctggccggtcttatgctggggcagattgccggtgggattgtgatggcattgcatgccgcgcaagggccgcagctggggataccacagatgatcagcagccgggtacagttcggcgtctacggcgcctgcctgccgattctgctggtctgcctgatgtaccttggctttatcgccaccggggcggtgctgtccggccaggcgatctcagcggttttccatactacggaaaccagcggcattctgctttttgctgccgccacgctggttatcgcctatgtcggctatcggttgatccacctgttgggtaagctggcgagcctggtggggattatcgcgtttatctacctgctgtggaaaatcagttcctttccggctattggcgacctgctgagtatccgaccctttagctggagtacgtttttaaccgccaccggccttgcggcttcctggcagatcacctttggcccctatgttgccgattattcccgctatctgccgcgcagcacctctcccgggaaggtctttttcgccgtcgggagcggttcggtgattggcgcgcaaatcgccatgaccgtcggggtgctggctgccgctctctcgcagggaaaactggtcggtcatgaggtggactacatcgtcggcctgggcggcaccggcgcgattgccacgctgttatatctgagcatcgcgtttggtaaactgacgatcaataccctgaatgcctacggcagcctgatgtgcctggcgacggtgtacagctgcgggaagcagcgagtgcgcgtaagccagtcggtacgtctgctggtgctggcgatgattattaccctggcgaccgctatcgcgattatcgggcaacactctttcctgtcggcttttaaatccttcctgttgttcctgttgactttctttacaccgtggagcgcgattaacctggtggattactatttcttcaaccatcaggcgatagacatggaggcgctgaacgatccgaacgggaaatatcgggcgtggaatgtgacggggctcggggtttatctcgtcggagtggcggtacagacgccgtttattgatagtggattctattccggcccattcgtgaagatgctgggcggtatcgatatctcctggctcattgggctggcgctaccggcggggctctactatgtcctgcgcaaagcgcagtccgcagcggcggctggcgccgccatcagtcgttaaaggagagcgccatgtataccctttggcaccactgccggatcgccaccatggccgctgggcattatcagttgcttgacgatggcgcgatgctgaccgacggcgcagtgctgttatgggtcgggaaccgggcagaattgccggacttacccgttgcgcagcgggtggatttgcagggcagggtggtcacgccgggactggtggattgtcatagccacgcggtgtttggcggcgaccgggcccgggagtttgaaatgcgtctcaacggggcgagctatgcggagatcgcggctggcggcggcgggatcgccagtacagtcaacgccacgcgacaggccagcgaaagccagttgctggagagcgcgcggcagcgtatccgggagctgtgccgggacggcgtaacggcgctggagatcaaatccggctacggcctggatctggctaacgaacgtaaaatgctgcgggcgatccgccgtttaggcgacatattgccgctgaccgtgcgcagtacctgcctggcggcccatgcggtgcccgtcgagtatcaggagcgggcagatgcctggattgactatatttgcgaacgactgctgccggaactgcatcaggaagggctggtggatgcggtggatgcgttctgcgaacacctggcattttcgccctcgcaagtggagcgggtctttcagaaggcccgggaactggggctgccagtgaagctccatgctgaacagctaacgctacagcatggggcggcgttggccgctcgctaccatgcgctgtcggcggatcatctggaatatttgtgcgaggaagatatcgccgcaatggcacgccatgggacggtggcggtgctgctgccgggcgcctattacttcctgcgtgagaaacagctaccgccgctggagctgctgcgtcagtaccgggtgccgattgccctcgccagcgatttaaatcccggcacctcgccggtgttgtccctgcgtctgatgatgaatatggcctgtacgctattccgcatgacgccggaagaggcgttggctggcgtgacgcttaacggcgcgaaggcgctggggctggatacagtttgcggttctctggaagccggaaaagaggccagcttcgtggcgtgggatatcgctcatccggcggagctaagctactggctgggaggctccctttcgaaacaggtgatttatcaaggtaaggaggtttattgtgattaaggcgtttgatttgcagcaggggaacctgccgcttctggtcagtatgccacacccgggaacgttattaacccccgaagtcgcccaggggctcacgccgagggcgaagcgtctggaagataccgactggcatattcccttgctctatcagaccatcgcggacatgggggccagcacgttatgcgcccgctattcccgctatgtggtggatatcaatcgcccggcggatgataaaccgctttacagcacggcgacaaccgggctgtttaccgatatcttttttgacggcgaagccctgttcgtgccgggcggtgcgcctgacgcggcggcgaaggacgcgatactaaaacaggtctggcagccttatcaccaggcgcttgccgctgaactggcacgcctgcgtgagaaatttggctatgcgctgttgtgggatgcgcactcgatcaaatccgtggtgccgcgcttgtttgaagggcggctgccggatctgaactttggtacggcggacggcgccagctgttcgacgcagctcagccaggcgctgctggcaagctgcaatgcgttcccgcagtatagccggatactcaatggccgctttaaaggcggatatatcacccgtcactatggcgatcccgccaaccatattcatgctgttcagctagaaatggcccagtgctgctatatggatgaggagagctttgcttatctaccggagaaagggcagcaggcgcaacaactgctggagaggttgattaatactgcgttgcagtggggacgagagcagtacggcgagcccggaatgtgaactcgtataaagctgaagacacaggcacccgaaaagtctgtaaaacagccgaaggcgataagaaaggtcaaataaagcgacggcttaccacctgcctggcttcttctgaagagagggggaatgcgggccgttagcggaacccccttatatccccgtctttctgaactgccccccttccttgcggaaaggggcttttcacaataccaggactgagcggaattcatgaaccgtcttctgcaggacgtgaggcggtcccgcttgctttcctcatcgcctggctgtactgccaggtggaaaccagacagaccagtaaaaccggtatcatcatcagacccagcagcttccagcccagcaaggccagcatcacgcccgctccggatgtggctatcgcggagaaaacaaagcggctggtttcggccagaccctgcgctttttttcgctcattatcacggtaggacagactgagcagcgtcgagccgccaacaaacataaagttccatccgaccccgaccagaagcagacttaagctgtatgccagcatcgtttccccggtcaggtttatcacgacagcggatatgttgagcgcaatccccgcgtacagcagaacggtgagccccagttttcgtatcaggaggccggtaaacagtgaagggacatacatccccagcagatgcagctgaatgaccagtgcaccatcattcatcgagtggtggtgcgtaacggagaggggggccgccgtcatcagaaaaagcataacgaaggagccaataaccaggtgaaaccaggccgtacgataatccggacgtttcattaattcccgactggttggcgatactcccgggatcgcccgggtgtccggggaggggatgtctctttttgaacgttcgaggaacagagccaggttaagcgcagacagaatccccagtcccgccacaacgagataaacaccggcaaagcgagggagaccggggatatcccgtgcaacaatcgtcagcaacggccccaggatagctgccacaacgccgccaatcatgaccagggagattgactgccccttcacttccggtggggagtgatcggcagcaaccagacgatagtactggctgaaagcctgatagacacctacgagaaagcagccggtacaaaaaagtaaaaaactgcccttcagcacagcgagaaaagacaataatccgcccgaggtaccgcataaggagcccagaataaacgcgagtttttcgtttccccgaccaatcatgccggccgcaaacagactcgagaacgcgccggcgactgtgatgagtgcaaatggaaccgtcgccagttgagcagacggcgccagctgatagcccaccagggtggcaatagtcagatcaacagacacggcacaggtaaaaaacagattactgactgcaaggataacggggatcctgccaggtatatatcgcatggtctcctcctacaggaattcccccaggcccggtaataaagcgtcatatttcgcgcttacccatttctgaattatttcgtcagggacaatatggttttcttttgacggaatgtgttcagggagagtctgcaatatgccaaaggttgaaaccgtttcatcagtataatattcgtcatgactggccgtaaaatgacttaataccgattccatatttattacctctccattgtgtgaaaaagagataaagcaagaatggtgccatttaaaaaaaggatttagcccgctttttccggggttcttgcaccgacggggagcaaatgtatcagccctggtgcaataaatgtaattgcatagagatattattaaaactaaaccagataaattatcttgcgctgcttttttgacatttaaaaaagaagggggcgcaggagttcgctgattcagctaccgatcttctcgtctaaaggtttgaatggttttatggcggccacggggggctcctgtctgttatgaaattgaactggggcgttcgatgtgtttgcactcaagtgagcatcgactgctgggcgaagatacccgccatcgcgccctgccatgttgccgtggtcacagagggcattccggggttggcgaggtcgccagcggcgtaaatgcctggcatgctggtttcgcggcgctcattggtcttgagtacgaggccggttggcgtatcaaccgtggcgagacccagggacttatgcaaacttgcggatggcctggtacggggatgtgcgaagaggatatcgaccgcgacagcggggccgttatcgagtcggacggtggacttatggccttcattaccgaaaatttccacgatcttgccttcaacgacggctttgtttcggcggacgaggtcggttcggatatcgggtgcgatgtcgtgaccatcggtaaagaccgtcaacctgtcggtccagtcatggaagagcctgacctgattgtgcgactgcgggccagaccagatgaggccccaatgctggtcggcgacttcaaagccgtcgcagtaggggcaaggtatgatggacgtcccccagccttcagcaaagccaggaatatcaggcatctggtcagtgatgccatagctcaggatcaggcggcgcgccctcaggctttcgttatcgtcagtgacgacgtagaaatcgtcgatggtgccggatacgctttcggcccgcgcattgaccagctcgatcgttggatagcgctccagctgctgacgtgcctcgaccaggatgtcctgcggcggcttgtggtcgtggccgagcacaccatgcgaatagccggcaaagcgattgcgcggccgatcagtgtcgaggaccgtgactttgcgacgggcgcgtccaagctgcagggcggcggcaaggccggcaaagctgccgccgatgatgataacgtcattcatggtgatgggctccgtgttttggatgcgggaagatggttgggtgtggcgcgccttgcgtatttgtgatacttattggtatcctaattatagaattaggatactgtcaaggactatatttcgtgacccataaaaacagtcagaccaggcggggccggcccgtcaacgaggcgcttggccaaaccatcgttgacgccgcgtccgaactctttttggaattgggatttcaggcgacgaccctggataaggtcgcccagcgagcgaagatatccaagctcagcatatatcggcacttcgagaataaagaggcgctgttcagtgcggccatcgtggccggctgcagtcagtcgtttgcaccgcaagtccttctggaaggcgttgagggttcggtcgaagagcagctgatggcggtggggtcattactgcttcgcacgctgctgagatcggacgttcgcggcgtcgaagccatggttacggccgataagaagaatcaggcatcgttaagcaagctccattacgaagccggccctgctcatgtcatcacccaggtcgaggcttttttgcgccagctgcacgcaaaggcgcttctgaacgtgcccgatcctcaccagtccgctcgtttgtttgccgcgcttttcaaaggctccgaccttctgatgatcgcgcgcttcgatgaggccagagcagaggacgacgacgaaatcgaagcttattgtcgctcggccgtcgccatgttcatcgccgcgcacggtggcactccgggggcgctatcgcggccgtgatcttgcctggtatttaaatttatatatctttacaattgatgtatatttttaatgtatttaacaatttaatgatgtactgctactggattgattgagagaaaagagagagaaaagaaaattttcaatatgaaaaaaagctcagacggtcattaaagaatttccttctaataaaaaatattttttatacacatttaattgcttattatttttaagcataggtaattactttttaattaatatttatgtgcaacttgttatttaaaaaaaatatcgatatccacttattaaggaaaaaaacacgtctgttcagtaaatctctttatatttcagggtggtgcgcgtaatttttcgacagtgagtcggtgcgttactgctttgctcccggggatggaataacattcgataaagacgtattccataaaagtaatcgatttttaccggggccttagttatcacgtcgcgcatttataatacgctttattgatgtacactctcgctataaccaggtgaattccgataaaactgggagtgatgtatcaattctggttaacaaaatgattgttggtaatggtaatcactttggtatacaaaaaggaacggttatcagaacaacatcagaggaaaaaaatgagtacgtatatcatcaagagaacgggtaatcggtacattgatatcagtagcggcaagacaattgatgcttattatccaaatggagacatgaataagcggtcctgtcttgccgttaaatataaaattatcgtctgcgaatccttcgaaattgagacagacatatcaaaggatatcacgtcaacagaagatgcttatctccgtttacatcttctttcatcccgtgaatacaaaccgaatgaaataaatctggaaggaatttttcagcacctgccaaatgtagcctggacgagtgcaggccctgtattcccggaagatgtacaacgtttacgtcaccttattgcggatgattatcatcagcttaccgtattcagcgttgataaatttccaaggatggttgactacactataccttctggcgtgcgtatagctgatgctgaccgcgttcgtctgggtgcctacatttctcagggaacgactgttatgcatgaaggttttatcaactttaatgcaggtacgttaggacaatgcatggttgagggaaggatcaccccgggagtaactgtcggtgatggaagtgatgtcggggcaggtgcctcaataatgggaaccctgtccggtggcggtaaacagaaaaatcagataggtaaaggctcattactgggggctaatgcagggatagggatctctctgggagattcctgcattgtggaagccgggttatatgtgacgtcagggacgaaagtgacgctgccggacggttccgtcgattatgcacgcaatttgtcaggcaaaaacaaccttctattccgacgtaacagcgtgactggtagtgttgaagtgctgacaacagacagcagtgtatggggaggagtaaatgccgttcttcaccagaacgactgacgccctcaatacttccgcagaccgcgtcgcactggttagtggtgcgacgggggaagtagggcaaagaagtgttaagttgcccacgcctgttaaaccaggactttcccggccgcggcatacgctctcccttccggcgctttttcgtcgcctcgctgtaaccccggctgcgttgccactgcgcccattccaccagtgcatccagccccatattgctcatcattgccagaaaatgtcgccgtttataatgcagtccacaaacgacggccagatttcggtatacaacatcccggcaagcggtgttcccgccagcgggcaaaatccccccacagttcggcgcgttgcgtgcctttgaacggcgtaccggtggtctgcgaaaagttcttccggcagtcattgcactggtatgaaggtttctgcccctcgcgttcacgcaccctgaatgactgactctgacagtatgggcagcgatccggctgctgaaaggggcgataagtcagctactgcaccagcctgcgggcgtcatgctgcgttcagggggaataaaccgttgccagttatcagccagcatcgttgcgctcccttaaccgccccacatgtattctggcggtctgcggcaaatcctccgcgggcggccgctcatctagccccagcataatgttgtaaccggaaaacaaccccaggtcgcccagacgcgggcggggtagcagccctgtgggcaacgtgagccagagtcgcacatcgtagtcgcagccgagatacgttcgcatcagcgtgaagacatccttcttcagttgcccgtccggcatccagcccctggactcatccggatcgtcggtgtacagctccacagcggagcagtaattcacgtcgctgatttcatcgccgagcaccagatgctccccctgtgttctgctgttatccatcgacaactgcgcgtgctcatccactggcatcagtaccgggtaatgaggtttcaccttcaccagcgtgaaaggcgcctgtgagcggataacggcggcgataccctctgcggtgtgggtggaatgcagcagcgacggcagtattgcaagcaggtgtgaagccggttgttcgcgcgggcgggcgatgccggccagcgccatcagataccgtgatgtggcatctgtgccacccggctcaaaggttgccgggtagttgtacttacgccagatacggtaaaactgcgtcatgatgcggtggttgaatatatccagaaacgccatcatcgcctcatgaccttcccggccacgggtaatgtcgtcgataaacgcggttggcagtggcgaagccacgccgtacagcccgaggaagtttgttctgactgtgggcggtgcatccggcagctccgggtcggtttcggtggtgcgcaattcgcctgccgggaaacccacccccggatgtggacggaaacgtaccgggtcgttttctggcgagcgacccgtacccagctttgtatcactcagtcgttcgacaagctggcagaaacgataaaaattaaacgctggcgtgcggtcgcgtccttcagcgtccagccagaacggagggagtccgggtttgttgtcgtccatcacatcagcaccctgtggatacaccgctccggccaggcccattcgattccggattggctcagtactaccgtcagttgtgtaaaacgggcgatgctggcgtactgggtgaaaaactgttccagcagttcgctgaataaccgggcatcccccagaccgctgaactgcgcttcatccagttccacatgaatacgcacaccgtgccactggtgcgatgcgttatatgcctggcgataactgacgccggtgatgccgtcgatacgccgccggttgttcctgccccccatccagtcgaacagtcccagggcaaagcgcaggttttcaacgttgttgatgagaaaactcagcgcacggggatgtagcagcgacatgacctcccactgataacgcggcgtggtcggcggataacagggacgggagggcaggctgcgggtgcgcccgcgcaggctcaggttcccggtggagtaatccgtgtcaaacagcgcctgttggagcgacatacgcggaaacgcgccattggtgcaggtgagattcagcagcagacgcacaccgggaagctgttcatgggttctgccgccgagcatcagcaacgtttcatgcatcccgctcacgccgcgccaggtgcgggtgtggaagaaacgctccggccactcctgctcgtattgcagcataccgcccttatggcgaaaatgatggtaaggcacatacggatattccgtttcgtcctcttcatctttctggcttaccgtgtccacgctgtagatttcggtatggccgtcgattaggcggtgcgggcgcaggcggtaatccagttgcgccggttgcgtcaccagtggctcccccgccagtcgaaacaggttaatcaccgggacgcagtgcatccggatggcctcttcagggacgggcaggttagtcggcatcagcgcacttaaggcaatatccagttcgaagtgtgaacattccggtggcagggttaacggcgtggaactgtgcagggtcataaagaaaaagcgcgatgggttgctgaaatattcaagccacgggcgtacctcgccgcacagcgccgggctgtcgctctccggccacagggcagattgtggagcatgccagcgcggggagaaatgaatatccgcaggatgttgctccgtctcaccgccgtaacgaatgcggacacgactgacatgctgactcagcgccagatacagcgccgcctgtagcggacgttcgccgttcaggtacagcgggatatcattcagggagatttgctgctcatccgtctgcgggataacgttaaaacgcaggcgcagcgcatggccgccctccgttcgcgtgtagcggctgatggtagccagagaaaacgggtgaatcaccaggtcgctgacggtgcggtacgggcagcggttgccgcgctggtactgcatggtgctgaccggcagactcagcagttccgttccggcaggcagcgtctgctcacgcagatggttttccggttgtggtggtgtcaactccaccaccgccgtggagggcagagtgcggttcactaccggcagcagatgggaaagcagcggctcggtcagttcggggatatcgtcatcaatcttacggcgtacctgcgccatcataaaggcgaatccctgaaacaactgttccaccgactcatcagttttaagtgacactgagtctatgccgagctgtctggcgacgtccggaaacttctgcgcaaattctttagccgcctctttcagataacgtatttcactgtcgtaatagcgcaaaaaatcgtggtccattatcagtccccttctttacgcagcacaaggtggcggtcattcagttccaccacggttggttcgctgacattcagggcatcacgcggaatgatgagcttccagttgttacgcaccgtatcgggccagaaaaaaatgccgtcagtgcaacaaactgcgtgtcgtcagcgagtggcatatccagatgtgtttgctgccctggcgtaaggcgtattgcctggtatggcgcgctcaggtctttgctcagcacctcaggcccctgtttgagcaggctgcggtaatcggccaggttaaacgttgtggcgttacgcagtggccagatccgcacctccaccggcgacgacatcccgtcttcatcggtgttcagcgcgttacgggcggccagtgtcagatgcagggtatccaccttccggtaaaaaatggcgtctgtcaccgccgttgccccttgtccggcgcgctgtgccagaccacagcctgccagggagaggactgtcagtaaagcgccgcagatacgccagctagcggacatcatcattacccccgtcatcctgaataaacacctgctcaggcaatttaaaacggcgcagtttcagcaaatccagcggcccgttgtagcgctgggcgcgcaggttcagcgacaggccgacgccgtcctcagcaggccagcttaagcgccagcggccgctgtcagtcttctcgcgctgcgctttctccagcagacgcaacagcgcccaggggccgtcggcctgaaaagcagtacgcaccggtccgatgttctccccctgattgcgggaataactaagcacggcctgtggctgcgcgctctgtttatccggccaggtgaatgtctgccattccgcctgctggttaaaatacttcatcatcgcgctgtctatctgcaaatccgtctccaccacattgcgcatcgggtacatctgaatatcaaattccgtatgcagttcgccctgcataaaaaacgcctgccccagttgtgtcagcagattaaccgcatccagaaacgccggactgaatttcatcccctggctgttcagtgcggaaggcacccagacatcgccctgtttatccagcaggccgcccagttgctgacgaagaaactgctccgtcacgccttgctgcggtgctataaaatgagccagcagcgccggggaggcatcattttcggaagaggcaaaggggtagcgcccggagaatgcatcctgccagggctgaacaatctgtgtgcgccaggcttcattcatcgcctgctgcgccggggccagtaccgactgccatgcctgcgcaagcggctgtacaaacgctgcatcagcgaagccgctccagtcctggccgagactggccgccagcagctcaccctggctgcgcgccaccgtcagcgggttgtcgcgccgggaaaaggcgtcctgtgccagtgccagcgtcatggcctgcggatccggtgaggtactgacctgccggagcgaaagacgcgcctgcgtcacctgaatcagataatcctgtaatgtcagcccgctgacgggcgttgcgctgtttttcgtctgaccaggttgattctcgtcagggggtaaaaccgccagcagcggcgcaaaagtttgcgtcaccacggaggccggatcggcagtttttgccgtgcgcgcatccgtactttcctgaccggaaacccgttgttttaccgattccagcagcgaagtgcccatcgtcgtctcttcctgcccgatacctgcctgccagcgcagggttttaccgagcgcgaccagcggggagcgttgtacgtcccccagcagggtaagctggtcaatggccgaagagagcgagtctgcctgacgccagcgcagactgttgaggaattccagccaggcgttgctgtagtcggtaaagtaacgttccgccagacgggtacgcagtgcctcttcacttaacaccggggaggttcgtccggtatcatcaagcacccagtcggtgtggatttgccgtccggctgccacctgatcgatggcctccctgacattctgccgccaggcttcgcgggtaaacataccgggaagtgacgcattgctgtagaacaggtcgccgctgccagcgtcccccggcaggtcgttgagggtgatatcggcatgacgctgcgcaacctgttgcagaacctgctgataaagcgtgttctcactgttctgtatccctttctgactgcgcagcagggtacgaacattcgcaatcatggtgctgtatgccgggagtcgccaggccgggtgcgcaggcagttcgcgcgcgtaaaaatccagcatatcggacgagagcatcatccattcaccgggcgttataccgcgggccgggttctgccataacggcaacaacacctttttcagaaattccggctctgcccgttccggttgcgtcagcatcagatacgccttcaactggcgataagtttctgctgtcagcgtgcggcgctgcgccgagccgggcggcagcgccatatactggcgtaaatggctgcgaagctgttccgccagtggtgcaaccagcagcgtctggttttgctgttgccagaccggccacatggccgccagcagcgcatcattctggttcagaccgaagcgataccaccagggagcaccttcgcgactgcggtataacagggtatccatgcgtgcctgacgctcctgttgctgacgcacctgctccgcgaccggtcgcgcttttttctccggcaacagcaacgccatatctgcctgaaccagacggtaattaaacagtgccgagagcagcattcccgctccccatagtcccagaaatgcaacggtgccacgcaccagccagtcgcctgcaatcaggtggtcgcgttctcccctggcgtgacgtatctgcgccacaggctctgaccaggccgcagacagtgaacaggcgtgctggcccatatgctgacccggcagggcggggggcatgaaaaacaatccgcagagtggggtttcgctcccgcgccggacgaacggttgcagggccgtggtaattctgctgccggtggcgtgctggatatcgtgcgacacctgcaacagccagttccagcgcggctgaagggacagttgcgccattccctgtccggtcagttgcgggagcagggtatgcagttgcgtctgaatattggtttcctgcgcaggggacaaggcaatacccacactctggcgcggtcggtcgtactggtcatgcacgctgtcgcgcacgcagagggtgtacagcgggggccgccagctcagcgtgcgggcaatatcccgtaactgctgccagagcgtgcgcatgactccgtcgttaaactcgtcagggctgctgttttccagccctggcagacgcgccatacccgaaggcggcgtaatgtccgtcacccacagcaccgcgttcagcacccgccgcccgcgcagacggcggaacagggcgatgtcttcctgagcaatgtttcccggctcgccgcaccacagcagagtggcggacaggctgcgctgccagcgttcactggtcagacccggcagcagggcttccacggtctgcgcctgccaggtgaccagcagccagggctgacggtgacgccggtgttcattgtgcagacgccagaatacccgttcgctttcttcctgttttttatccgctggccgggagaaagagagtagctgaaaggcaaaacccagtcgcgccagcagaaaatagcccagcagaatgcccgcctgggcaatccgcagggtggattcatccacaaaccatgcctgtgcctgcgtctggcacagcgccatcaacagtatcgccagcagcaataacatcagatgaagcgctttactcatggcgtatcccgccctgcaactgccactcatcattcagcctgcgttgccaaagaatcagggccagcggcaccgctgccagcattaacaatgcatacagtacgccgccgcccgccagccacggccacagcgtctgctgcaccgttgagtccatcagcagaaagaacagcagcagtacgcagcagacgcccgccgtccaggccagcgggtagcgtgatatgctatcctccggccactgggtcgcgggcgcgggatggacgtttaactgtacgcaggcagtttgctctggtaacggtgccaccaccatctggccgcgctgcccggtgtcggtggcctgtgccgccagtcccagcgccagccagaagctgtttttatccggctccccgatatggcgggcaagcaggtgctgtccgtcagacggcagtgtctccccctgcgcatccagtacggcaagcacggtattacgcgcgcgggtatccagcccggcatcccacaggtggcggcgctgcccctttaccatctgctccaccgccagcaggtccgtcagagcctcttccggttcagtggcgggtgcaaacagcgggcgaaataccgataccggacgaaaacccgtgttttcaggtaaacgctggcgagccgccgtgaacaacagcgccacgctgaattcactgcctgccgcatctgcgctgagcaactgtgtgcagagcagcagccgtggcgtatcggacgcttcatcgcaccactgatacagcaggcgggcatcaggcggctccgcctgccagtgaatacggttgtccggcaactggcggctcagcaacgcaagccagcactgtgccagcgcctggcggctttcgtcttccacgctgccggtatacagccagatatccaccaccggctgcggacgcagaaccgccagtagtggtgtgagcgtttgtgtcagaatgtcccgtaacggcgacatgcccagctcactttgcggcggacggggcagtaataccgccttcgctggtgcctggggcacgacgccttccagccccagtacacgcagtgcaaggtcgggttccggtgtcagaacatgccatgcagccagcgtcagcgactggcgtccccactgtcgccactgtgcctgcttactgtcgataaacagatgccgccagcggatttcccgccgctgatgcaggacatggcttagcagaaacagctccagcgccacggaggtcagcaggggaataagcagcagccagaaccagaaacggcggtcggcgaaaccccgcgccaccggccaggtgaaaaacagcaccacagccgccgccagtacacacgccagcggcagtaacaaccatacccaccaggcagggaaacccggtagcgatttacgctccatttgcggtaaacgccagtccatcagcagtccgctccggcattgggcaacgatgttctcagcacgcatccgcactgtgccgtgcagccgtcaacaatcaccgcccggccattcatcgtccaggttgggtgaccctgggttactggcacggtgccgtgttgcgggcaactcacggtatcgcccgccagcatcacaggtttgccatcgaacatggccccggatgcggtgatgacgttgccgccgtgagaatggctgtcgccgagtcgaattacgccgcgcattaattgcctccctggtgatagcggtcaacagcagcctgaggaatagtctcagatattttatccacgccgaaaacgtccgactgaaaaccggccatatacatgatgacaaacggtgttcctggctttttcccggtctggtaattttgtgactcagaagtgacctgataggttttatttttatcagaaggcatcaataaccccagccctttaataatagccgtgcattcggtatatccctgttctttaagctctttggcttctggcctgatgaccgataaaaattgcggttgatggtcttctgatttaatcattgccagataactgccatcgctttgcttctgaatatacaggtctgcacgctgctcgactttatagctcccctgaagttccgggcaggcataaacaaaaacaggcaccattaacaacagtgaacccagtatgttttttgacagtaacatcataattcatcccttctgtttgttattgtctgcgacatcaggaaaagaagtatcgagttcttcattatttattttccctgttccgatgcagtcagccctaaatccgggtcgcagcgcatatggtcccagccggtgtaatttttaacttccgggactttattggggatgccctgccagttgggtttgtgagcaaaaatactccagtggtctgggccagcaactgcgttccacgaaatgtattctcttccccagtcaagtcctgagcttccgggcattaaacgatcctgttccagttctccccgcgaattatgatatgagtaaggaataccttccccccccttttgaagacgcggatcgtcaaagggttttgagctcatataaatatcgccggatttagtttgtataaatccctgatcgtttactactgtgaaagacagaatatcatcactttcaggacccgaggctccatattgctttgcgcctccacccggcataaagtgggcatcgtgccatgttttcccataatctttagaaaccattacacctgatacatcgtaataggtgatcgcaatgtacttttcggaaggatggacgtattttttggtaaagagacggtaaaactgagacgtcacttcggtatggatattacgctgtgtatccgtataccagagcgccccttcacagttgaagcccaccaattccagataacggtgatcgtcaaaacgatataccacctgagtgggaggtgtctgtctggccgtacccgcactacaggcggtcaatgcaccggttccgacaacaagtacgtgtataagtatctttttcattgggtttcctctcctcaaacctgtggcttcggcatatcccactgtaaaacctccaccatctcgttttcggtatcacgtttactgcccggtttaacgcgttgacgagggccatagtcattcaccacgccagactcccccgtgggcattggcttttcgcctgtttcaggtttgttcattaattttttgaattcatctggcaatattccctcttgatagtatttcttgattttaggctctggattccccggtctgcgccagtccgcctgtaacagcaaactgtcccagaacgccttattctcaaacgcttcattacgaccaatggccaggtcatagggtacggctttcaccggcacatccgggttacacacaattgacgagtgttgactgtaggtggtcttgttggcagcgactttctccagctcttccttcgtcatatagcgccgtactttcagccgctgtgacgggccgtatccaccctccaccctgccgctgacagcttccatctgatgaagcgtgctcaattctgccagttgcgccgtacccagcgactggccgtcgcgcagatagcggaacgtcgccgtatccggcacctccagcacctcctgcggaaaatcctcggcttttcttgctgccttagcgattgccgggtcattgccagtgagcgacatttcgtaaccgtctttttgcccctgaagctcaaagacgaagggggcgggcagtaccgcgccgttgatggtgacatcctggtaagtgtatttcacatcttgcttggggatttccgggtcatttgctttcgcctgcggcatgacaaacgaataaccggttttatctcctaccatcacatccttgcagaacacccgctggcgtaaattctcccccatctgcgcgctgattttgtccggaatgccgcgccagcccatgccctgcaccggcagcatcgacacaacctggtcgttcgggcagaaatagttgtacaccaggccaaagttgttgcggttgtatgcttcagcactccatttgtcccgtccgctgcgcgacaggcaaagctggtcgtacagtttttcagtatcccccgcattatgggactgaccgccgttatactgagggttatccgccattactttgcagaagtgtgccagcgtctgctgacgtgccttatccgtctgctggttgcccggctgggcgttctccagccagcggttttccagcgaataaggggagttattgaggattacacaatctgcggggttaaaaccttccgccttcacccacaggttcgccagcatggtgacaatggtgccctgactgtgggcgacaatattgatggtgtcttttttagttgattcattctgccggatagccagaatcaaatccgccagccgccgcgcggcgaatgcctggtaaatgcggtgcgggttggcataaatcgggtggctccagtcgccgtcattcatcttcgagcgggacagcgccccgacaatctccagcgctgcaccgttagcgcccggcccgaacatatcggggatgttggtggtggcgttggcgaaagtgccgccccctttggcgaacgccggatcgagccagttgttcaggttatcgacattttcaccgttatgggcatgaaggacttttttatcatcctgttgatacgtatcgtaagccaggtctgtcttatcccgcttttcccgcagttcatcgcgatagcgcttctggtcggcttcccaggtggctttatccacgggtttgtatccccagtagaacgggatcgttggtgaacggttcaccaccccgatacaggtctgtttttcctgtggacaggtggtggcggagatattgccgtccgggtcgcttatcatgaattcatgtgctttccagtcgtggggatgtaaatcatcccggcccagccgttcgttcagcccctgacagataccttcgtcctggttctgataggcctctcccacatcattgacgccgtgaaccagaatcacgatacagggtaagggagactccacttcacaatcctgcaccagcatttttcctgaatctaccggacggcagatgtcccccaccgataaaaacttcgggttacgaatatcactcatgatgcttctcccttaaggagttcaacggtggctttttccagttcgttcattgtcagtagtgaagattcgccactctcgtctgtaatgccttcctgcacggaaccatcctgacggtgaatacggaatttctggtttttcagaatatgtgaaggatcgcccttgcggtgcaatcggtatttcaggccaaacgtcccttcgttaaatgacggcatcgcctggctgatgctctctccgccctggtaaatcaggtttggcgttttttgtacaatacgcgtggggccaagctgttcaagcacgccgtctttaatgcgaatgcctgcaccgccgcacatcagcagcagctcctgtttagcattcagcacaatgcgcccgttggtgctggtcagttgcatatctgcaaacgaggtcagttccatctggtctttctgcgcctggatctgaattttcccggcggcggctatcagtttgatgcccattttgtgaacgaagacggagaatatctgcccgacggcgatggaaaactggcggaagacgctgaagctggcgtcctgtccggcggtggcgagcaggtttttgccagcggaatgttgcagggactccggcgtggtctgagcaattccggcttcgccatgtaccacgatgccgggctgttgcagtgaggtcagggcagcggaaagctgctgttgcgtggcggtactgaccggagaggactgggcgatattcgccgtctgctccagcgttttcgccagcgccagtgctttctccagttgcgcgatggtcgctgccatatccagttgtttgccctgcgcctttggctgggcttcgctggtgagcagaacgccttttgcggcgcgtatcgccgcccagcccccggtgcgcagttccgcgccttcgccgcgcagtttacggttctgatccaccaggttgccgaggttaagctggctgcggtcattattgggtgtggacagcttgatatgctctttgccgcgtgtgtcatccatccgcattttgttgccggaaggcgttcttaacacattgcgtttgtggttctgctgcgcgacatggtccgggtgggtggaatcatgcattacatgggcgatatacgggcgatcgccgtcgctgttttcaaacgctatcagtactcccgtaccgtccagcagcggccagtggaagccgtaagtatctccggcataaggtttcgccagccgcacccagcagctttcaaagcctttcttccactctttcaggtcgagatcaaaacggatgcggtaacggccctgattgtcgatatacgagtaggtgtcgttttcctcttcgctcgacacgcgggctggcagcgtgccggacatcggcggccacggcagcagcggcgggcggtatgtaaagcggttgttccagggaacggcggtgaaggtgacaaaatacgctgtgtcgcgcgccacgttttcgcagcgggtggagacaatcagcagcccgtccggcgcatcggcgaaggttttaccggtgacggtgattcgcatccctggtcgcagggccatgcagttacatttcccttcgaaggtaatcagttcgctgaggtggcgctcctgacgacgcttcgcgtaccagatgccctggccgggctgctcctcatattcttttccggcgtcgggataatgttccgcccagcggtagtcggtggcccacagagctcgaaaatcctcatgggttttcacttccgacttcatgtcgctctgcgcctgaagatagttatcgtcgttagtctgcacccgtttcggcaccgcctggcggttaacggtgatatcccataccgattccagcccgccatcgaacaaacctgaaggatgacggaaggggattgccggaccttttatccagccgccggaatggtcggtaaggacaatgacgtcttcgtcattctcttcgtcgtactgacggtaaaacgacacaccgctatcggccagacggcgtgaaacgtggtcgtagtcggattccccatactgcaacataaaatcgcgtggcgggtagcgatcggtgagcttaaagacgaagcttagtttgtctatcaggtagtcaccgaaggtgtgttccgtcaggctgatgatgctgtcattgaggaacaccgcgctgttgtgcccctgcgccatgcgcgccattttgtgttcgagcaccgcgacatagcgggtttcatcggcggaggtgctgcactgacgaaactgcgtaataataccggggagaattcggggtttaagtttttcgtaaggcttgccgtcggggtacatcagtaactgtgcgctgtagttaatcagcagatttgcggggatgtcgggcgtggcgctggtgaatacgatttcgtagcggggtatctgactgatggcctcacagccgccgaatttcaacaccgatatctgaatatccggccttgcctggttcagctttttcagcagtaactgataatggttgtaagtgccgtacttaccgcccgtaataatgtagtcctggatcgccattgattatccctgccaccttgttctcgaaagaataaaatctgaagcgcaataacaggagggatattacatctcatcatatccctgaccatccgatggaatgtagttaatcgttaatgtttgatcaggatcaggatgcatgttgtttatgataaatatcaggatgtaattagctgaatgcatttatttatctgataataggtggatgcatgtttcctttgtaaattcagaaaacaaataaaataagcgattttatttatttcattaatacatcgttactgcgtaaccatatattaaaagatcgcgttaaaatacttttccctttttttaatatttattcctgtgcgctcccgctcatcctcaccgaggagcagtttttccagcatttcacgctatgttacatccagaatcgaaccggattgaccaccaaacgtatgcgatgtcaagaaataacttgagtgattaatgaacagaaatgacttgtaactgtttgattttattgaacttaaaggagtggtgcaatgtcatgaagagatgaaatggtgccgataataggagtcgaacctacgaccttcgcattacgaatgcgctgctctaccaactgagctatatcggccctgcaagatgtgctgacgagcgtaagcacgggatagaaggttaaaactaagtgggtgatgcgtcaatgcccttgcgaatcaaacggctacttttgcatcacccaattagcattaagcacgaatggtatcgtcgccgaaaccaatccacttataggtcgtcagggcttccaggcccatcgggccgcgcgcgtgcagcttctgggtgctgaccgccacttccgcaccgaggccaaactggccgccgtcggtaaagcgggtagaggcgttgacgtacaccgccgaggaatccacctcgttgataaagcggttcgcgttgcccagggtgcgcgtcaggatggcgtcagaatgctgggtgccgtgctcgcgaatatgcgctaccgcttcatcctgatcggccaccaccttcacgttcagatccagcgacagatactcattgtcatactgctccgctttcaccggctctacgctggccgggccgttttgcagcgcgggcagggaggccgcatcggcgtgcaggctgacgccgctttccgccatctgcttgctcagcgcgggcaggaagcgttcggcgatatcctgatgcaccagcagcgtttcgaccgagttacaggcgctcgggcgctgcactttggcgttaacgataaccttcagcgcttcggcaacgtcggcggagtggtcgatataaatatggcagacgccgataccgccggtgatcaccgggatcgtcgactgctcgcggcacagcttatgcaaacctgcgccgccgcgcgggatcagcatatcgatatacttatccatcttcagcatctcgccgaccagcgcgcgatccgggctctcaatcgcctgcacggtggccgccggtaagccgcactcctgcagcgcctgctgaatcactttcaccgtggcggcgttggtgcgccaggtctctttaccgccgcgcagaatcgccgcgttgccggttttcaggcacaaagaggcgacatcgacggtcacgttcggacgggcttcataaattacgcccaccacgcccagcggcacgcggcgacgctcaatgcgcaggccgctgtccagcaggccgccgtcgattacctgaccgaccgggtccgccaggctgcagacctgacgaacatcgttagcaattccgctcaggcgcgccgggttgagcgccaggcggtcaagcagcgcctcgctcaaaccgttggcgcgcgcttccgccagatcctcagcgttagcccgcaggatcgcgtcggtctgtgcttcaagatagtcggcaatcttttccagcacccggttcttttcgcggctggaaagctgcgcgagtttgtacgaggccgctttggcagcaatgcccatttgttccagcattttcagctccttaacggataatcatgtcgtcacggtggacggcgaccgggccgtattcatagcccagaatggcatcgatctgctgcgagtgctgcccggcgatgcggcgcagcgcatcgctgttatagcggctgacgccgtgggcaatatcgcggccttcaaggctgcgaatgcggatcacttcaccgcgcgagaagttgccggtgatggttttaatccctttcggcagcagggagctgccgcgttcgagaattgcctgggtcgcgccggcgtccacggtaatttcgcccgccggcggcgcgccgaaaatccagcgcttacggttttccagcggcgattcctgggcgtggaagcgggtcccgacggagatgccctccatcacgtcgccaatcacccccggacggctaccggcggcgatgatggtatcaatgcccgcgcggcaggcgacgtcggcggcctgcagcttggtgcccataccgccggtacctaaaccggacacgctatcgcccgcgacggcgcgcagagcgtcatcgatgccgtaaacgtctttaatcagctcggcctgcgggttgttgcgcgggtcggcggtgaacaggccctgctgatcggtcagcagcagcagtttatcggcgccggcgaggattgccgccagcgccgaaagattatcgttatcgccgactttaatttcagcggtcgccacggcgtcattttcattaatgaccggcacgatattgttatccagcagcgcgcgcagggtatcgcgggcgttgagaaaacgctcgcggtcttccatatcggcgcgggtcagcagcatctggccgacgtgaataccataaatagaaaacagctgttcccacagctggataagacggctctggccgaccgccgccagcagctgtttcgacgcaatggtcgcgggcagttccgggtagccgaggtgctcacgtccggcggcgatcgccccggaggtgactatcacaattcgatgacccatcgcgtgcagctgcgcgcactggcgcactaattcaacgatatgggcgcggttcaggcggcgggatccgcccgttaaaacactggtgcccagttttaccaccagcgtctggctatcactcatgattctctgccgttcaaaaaggagtttcgatatcgagttgatgttgtaacaggagtcagcccgcttgccaacacctggcgtggtggacgaaccacttcattgcgcggatcgggcattctggcggggaagtgtgacacattcatgacggaaataatttaatacccttttttagaaaaagttccatattgtcataaatttttaatattagagcgttaaaaaacctgcagtttttgacggggcttccgcccggaattgattagcgcgtataaataaatcaccaggactgaataatgaaaaagagctcactggcattaatgatgatgggtcttattgcttcttcggctacgcaggcggcagaagtttataataaaaacggcaataaactggacgtctacggcaaagtcaaagcgatgcactatatgagcgactatgacagcaaagatggcgaccagacctacgttcgtttcggcatcaaaggcgaaacgcagattaacgacgatctgaccggctacggccgctgggaatcggagttctccggcaacaaaactgaaagcgactcttcgcagaaaacgcgtctggcgttcgccggcgtgaaagtcaaaaactacggttcatttgactatggtcgtaacctcggcgcgctgtacgacgttgaagcctggaccgatatgttcccggaattcggcggcgactcttccgcgcagaccgataactttatgaccaaacgcgccagcggcctggcaacctaccgcaataccgacttcttcggcgtggtggatggcctggacctgaccctgcaatatcagggtaaaaacgaaggccgtgaagccaagaaacagaacggcgacggcttcggtaccgccttaagctacgacttcggcggcagcgacttcgccgtcagcgcggcctacaccagctccgatcgcacgaacgatcagaacctgctggcccgcggcacgggtaaaaaagcggaagcctgggcgaccggcctgaaatatgacgccaacaatatctacctggcgaccatgtactccgaaacccgcaaaatgacgccaatcagcggcggttttgccaataaagcgcagaactttgaagccgtggcgcagtaccagttcgatttcggcctgcgtccgtccctgggctacgtgctgtcaaaaggcaaggatattgagggagtggggagcgaagacctggtcaactacattgacgttggcgtgacctattacttcaacaaaaacatgaacgcctttgtggattacaaaatcaaccagctgaagagcgataataagctcgggatcaacgatgacgatatcgtcgctgtcggtatgacctaccagttctaagccgtcgccggtaaaaaacaataaagccgccgtggtgacagggcggctttattcttgctgattaacggtttttcgccagatgcagattatcgttattcatcgtgatctgcgcgttatattccttcggcaggcggcgcgcctgataaaataccgattgccagtacggattatccagcgaagagcgcatcacgccctggctggtggaggcatggaggaaattacggtcggtatcatagaagccgacgtgcatgccgcctttaatacggaagaaaaccaaatctcccggccgcagctgccgcgggctcacgcgttctcccatatgcagcagttcgcgggtggtgatgcgctccatcggcaggttgaagcgatctttgagcgtacgccagacaaacccggagcagtcgaccccgctttgctccgtcccgccccactcgtagggcgttccctcccaggtatgcatctgatcgtgcagcgcggcgatcaccgggatcagatcgtcagaacctccgtcgatggtcgcgtggctactctgggcggcggttttatgcggtttcgatgaggatgaacatcctgccaaaagcaaaaaaggaacaaataatagcgcgtgagagagtctgggcttcatatcattgtttttcgtcactgaaaacgggccgtgatattttatagccgattcgctacggcctcagaatgaccaaaagcaaaatttacgaaaccttacgtaaataatataggtcggatacgcggtgaacatcggcggtctttattttcgccgggagcgcctcattttccattaataaattttttctccgcgaaacaatatttcacaaatatccatatgtcgcgcgtctgttccgcttcagcgcaaggtgaaagatcctcatcatcccgccattgcgccgccaggctgccctccagtacttttgtagactaaaagagagagtggggcgggctaatgcatctggattttcgccaactgcgcaactttgtcgcgttagttgaatacggcagttttaatcgcgcggcggaggcggtgtgcctgtcgcagtcggcgttcagccgcagcattcaggcgctggagcagagcgtcggccatccgttattcgatcgccagagcaagctaccgacgctcaccctgcacgggcaaaagctgctgccctacgcccgccgctttcaggagctgaacgtggagctcagcagccagctgcgcgaagcggacgatgcgcaaaacggcgaggtcgcttttggctgcgggccggcccctgccgcaaggctgattccggccgccgtcggcgagtttcatcgccttttgccgcaggcgagggtgcgctttcagattgataactggctggcgctgcatcaggcgctgacctctcagctctacccttttgtggttgccgacagctggcaggccgagctcgacccgcagctgcgcgtgcagccgctcagcccgcagcgctgctttttcgtctgccatgccgatcatccgctggccaaacaggggccggtctctatccaggcgatgctgcgctacccctttgccgccccctatctgccgccgggcgtgcgcaaggtgctggcgaccctcagccagcagcaggactttaccccggcgattcagtgcgatcatatctacgcgctgcttgccaccctcgcgcagaccagcgcaattagctttgccagcgaggacggcttcgcgctatgtcagcacagccatcggctggttaagctggagctcagcgatctgcctgaggagtggcggctgatgcagacccggtttgccattatctctccggttcacgcggcccagccgccgctggtggagaagctgattgagattatccttcataccgatcgtcagcatcagcttcagctgctggcgcaggaggagaggggttaaccggcgtttttcgcctggcctttggcatcgtactgcggccagcggttttccagtccctgggctttcagcgcctgctcgacaaactggccgtctacccactggctgacgtcaaaagcgctgcggattagccgcccggatttagcctgttcgacgctattgctaaagctgtcggtcaggaacggatcgatacgcggcgaggtggtaaagttcagatcctgcggctgcagctcttcgagaaacagcgcctgcgggatctggctctgctgcgccatctcggcggaccaggcgtcgcgattggccgggtcactgatttcagcggcgttcttcaccaacacgttaacgatctgctgggtcgcctgcggccaggcgtctataaacgtctgcgtgccgaggaacccggcctgagtggtgttctggcggccggagtcaccgcttttgacgaccacatcaatcttatcgccgcgtagcgccagcagcgaaacgccgccccacaccgcatcgacgcgaccggccgccagcgccgctttgccggcgttccagtcaaggttgatcgtctgcaggctgcgctcgttgaggccgacggtttgcagcgcccggtcaaaggccagctggtccgccgtgccgcgataaaccgccacccgtttgcctttcagatcggcgagggttttaatcccggaagctttggtcaccgcgaggtaagattccgaaccccggctgcccagcagcaggcgcgtcggcagcccgttggccctaccgataatcgccgccagatcgccgaggtagacaaaatccagctggcggttggctaatgcttcatttaccgccggaccggcgcctttgaaaaactgccactgcacttccacgccctgcggcttaaacacctcttccagctgatggcggataaacgccatgccgaccggcccctcaataaagggtttactgcccgcgctctggtccggcacgccgatgcggatagtgcgtagcgtttcggcctggacgctggacgccaggctgatgaccgcgaccagcgccagcaaggtgcggttgaatattgctttcatcataacgtgttgctcccttgagttttttctcaccctaaagagccaacgggctgcgtgttaaatgcttttattcgccaagcttgggtgaaaaaaagctaaatcaaacgccgcgcgcccggcaggctgaaatgcattcgatgcatcgggattattcgccttacgcaatggcggcgaaggagaagtcacgttttgatagcggcataacttgccgaaaagtgggccgatatgtcgcagatgatcttaagaaccgatgccccaggcaggccgggcttcaggcttaacggctggccgtggctgctgcctgcgttactgctgctgctgtggtacatcgccgcccgcgaacgatggatgccggagcaaattttgcccgcgccgtcggtggttgccgataccgcgctatcgctgctgagcggggatctgctggcgcaatggggattcagccttcagcatctggcgcttggcctgctgctgggcgctatcgctggtacgctgctcggcgcgctgttcggcctggtgccggccgccgcgcagcgggtggaaccgctattctacgcgctggcgcaaatcccgacgctcggctggatcccgctgtttatggtgctgttcgggattgataacggcctcaagctggcggttatcatcaaaaccaccgtagtgccgatgaccattaacacgcagcaggcggtggccggcgtgccgcaggccctgagcgaagccgcaaaggtgatgaacttttcccgctggcagcggctgcgctggctggtgatccccgcaagcctgccgggctggtttaccggcctgcgtctggcgctatcgcaggcctgggtgtcgcttatcgtcgtcgaactgctggcctcttcagaaggcattggctacctgatggtctggggtcgccagctgtttcagctggatatcgtcttcgtcaccattgcggtcgtggggctgagcggcatgctgatggagtgggcggcgaaccgcgcctgtacccgtctggtgttctggccgcagcctgccgccggacgcctggcgtggaaaccgcaggccagctggcgggcgctgcagctgccgctggtcctgctggcgctgtggcagctggcaagctcgtggggctggatcgatggcgcgctgttctcttcgccgctggcggtggcgacgcgttttattcagggcgccctgagcggggagctgaccgcggcgatgctggcaagcctcgggcgagcctttgtcggcggcgcgctggggattgcggggggcctgctctgcggactgctgctggcgctgcgcccgcgcgccgggcaaatcttcacgcccacgctcaacgtgctgcgccatatcgccctgtttgcctggctgccgctgctgaccgcatgggtgggcaacgataacggcggcaaaatcgtttttatcgcgctggcgtcgttctttccgatgttcttcagcaccctgcaggccgtgcttcagcgtaacccgcagctcgacgaagtcgccagggtactgcgcctgggcgagttagcgcgcctgcgcagggttattcttcccggcgcggcgccggggatcttcgccggtctgcggctggcgctgatttacgcctggcttggcaatatcggcgcggaatatttcatgtcctccggcgtcggcatcggcagcctgatgatcaatgcccagcagctgctggatatgcccaccattctctgcggcatggtgctggtcggtatcaccggcgcggcgctggataaagccggacgtttactggaaatgcgcgccacccgctggcgtcaacaggagcagctatgacctcttcttcaaccctggtctcttttcgccacgtgcgtaaatcctggcaacaggtgacggcgctacagaatttcagcctggatatcgccgccggtgaactggtggcgctggtgggcagcagcggctgcggtaaatcgacgctgctgcggatgctggtaggccttgaatcagcgacccagggcgatatttgcattaacggcgagccggtcaccggcgtgggcaaagagcgcggcattgtgtttcaggagccgcgcctgtttccctggcttaacgtgctcgacaacgtgatgctcggcctggcggatgaaaagctcagccgggcggcgaagcgccagcgggcgctggaaatgctggagcgcgtgcagctcagcgaattcgtcaacgcgctgcccgcgcagctctccggcggcatggcccagcgggtggccattgcccgcggcctggtggcccgtccgcagatcctgatgctcgacgagcctttcggcgcgctggatgccctgacgcgccacaccctgcagcaggaacttttacagatccaccagcgcgcgggaaccaccacgctgctggtgacgcacgatgtggaagaagccgtcgccctggccgatcgcgtcgtcgtgctttcgccgcgtccggggcggatacgggaagtggtaaacctggcgctgccccatccgcgccagcgcgatgatgccgcgtttaccgccgcctgccgccagattcgcaacctgattacttctgcctgattctattatttaaggagcaacatatgggacatccttccgtctacccgaccggcgccaccctctacgatccgcagcgcgcctggagcggctatacccttttccaggccaccgaacacggcgcggtgctggtggacatgaacggccgcgtggtgcgcgaatggcctgaactgcacgggtttcccaataaaatcctgcccggcggcgcaatccttggccacagcggcgagcgcgacccgcgctacggcatgcaggatatgctcgatctgatccaggtggactgggaaggcaacgtcacctggaaattcgaccgctacgagcaggtgagcgatcccggcaacgccacgcgctggatggcgcgcgcgcatcatgactatcagcgggcgggcaacccggtgggctattacgcgccggggctggagccgcaggtggatggcggcaataccctgatcctcgcccacaccaatctggtgaatgaagcgatctccgacaagctgctgctggacgacaccattatcgaagtcgactggcagggtaacgtggtgtgggagtggcgctgcagcgaccattttcacgagctgggcttcgacgatgcggcgcgcaccgcgctctacaacaacccgaatatgcgcgccagcggcggcggaatgggcgactggatgcatatcaactcgatgtcggcgctggggccgaataagtggtacgacgccggcgatacgcgttttcatcccgacaacattatctgggacgcccgcgaatccaacattattgccattatcgacaaacagagcggcaagatcgtctggcagctgggcccggactacagcaaaccggagctgaagcacatcggctggatcatcggccagcaccatgcgcatatgatcccgcaggggctgccgggcgcgggtaatatcctgattttcgataacggcggctgggccggatacggcgcgccgaatccggcgtcggcggacggggtgaaaaacgcctggcgcgattattcacggatcctggagatcaacccgctgaccctcgatatcgaatggcgctactcgccctatgaagcggatctgccgcagccaaccgattcgtaccgcttttacagcccctacatcagcaatatgcagcgcctggaaaacggcaataccctgattaacgaaggatcgaacgggcgcattttcgaagtgacccgcgaccacgagatcgtctgggagtatatttcgccgttctggggcaagaccctgaacaacaatatggtctatcgcgcctaccgcattccctacggctggatcccgcagctggcgcagccgcaggagacgccgattgcggcggtcgatgtacgaaccctgcgccagcccggcgcggcggcggccggtccggcgcagagcgtggtgcgggtggcgggcgtacagccgtacagtaaaagcgccgatgcgctgtgcgtggcaaccgataacgataccctgcgccgcagtccgaagctgttccgcgtcgcggaaagcgcgttcacgccgataagcgcggcgagcgagctggagagcgaacggccggttctgctgttcgtcggcgcggaacgctgcgtgcactgccgcaagctctggcagctgctggcgcatgaaaagctcagcccgcggcttgctcagctggatacgcgctatctggatgccgaccggcatcaggatctggcgagcgacctcggcgtgcgcggcctgccgacgctgctgctgattaaaccggggcagccagcatcgcgcgcacctgcgcagctcttggtggacacgctgctcgactggctgcatcgcgcagccgggtaatccgcgactacggcgggctggcgcgtgccggttcgccgtttatctggcggataaacgccatcggcgaatagcccatcgctttgcggaacatcgcggtaaaggcggccggatactcatagcccagactgagcgcgacttcggtaaccgaacgcccctcgcgcagcgccgtcatggcgtacatcaggcatgcctgctggcgccagtcgcaaaacgccatcccggtctcccggcgaaacagacgattaaacgtgcgtacgcttttactcagtttttgcgcccactgctgcggcgtactgcggatgctcggctggcgctgaaaatcgccgcatagcgccgcgaggtggctgttctgcggaagcggcgtaaacatcggcagcggcgcggcggcgcgcagttcatggagcagcagcgcaatcaggacggcatcgcgcccgctctcgtcgtacagcagcggtagctgacaggcggccagcagcagctgatgggtcagcggagaaacctgtaagacttcgcagcgttcgctttcccgcggggcgtcccgcgcgtcaatatacaggctgtgggtgctgacgccgggcatccagacgcgatgcggtttcgtcgccgggatccagaccccgctgaacggcggcaccagccactggccgtcgtccgtttcgaccttcattaatccgtgcatggcgtacagaaactgcgcccggcggtggctatgtcgctccagaagcgtgttgggcggatagtcgctgcccagcgccagcacccggcgaggaagatggtcgacgtcattaatcgcaacgttgcgcatgaagatagccctggctgaaattcgtaatagattggctttaaagcgtaagccggccacggtgttattctatatcgttacctccttttgtggaggagtgcgaatgagcgactggctttttctgtgcggcatactttccggcgtgaccacctggctctttggcttcggcggcggtttcgtcaccgtcccgctgctctatttcctggtgaccggcgcgtggggcgcgcaaagcgtcgtcgggcaacaggcgatgcacatcgccgtcgccacctcggcgctggtcatgctttgctccgcgctgctggcgagctggcgacacgcgcgtaccggtaccctcctctggcgccgcttatgggccatgctcaccggcattgccgttggcggaacggcgggcgcgctgctggcgcttgagacgagcggggcgtggatccgctggctgttcgttatctatctgctggcaaccgttgccgattgctaccttcgcgccggatttatgaccccgccatcccaccgggtgataccgacggtgccccatgagctaacggtaggggggatcattggcctgatcgcctcttttctcggcgtgggtggaagcgtgatgaccgtccctctgatgcgccgtcgcggcgtgctgatggctgaagctgcagggatggccaacgtattgacgttgccgctggcggcaacggcgacgctaacctggctgttgatggcctggctgtcgccggtggcgttaccgaatgggtttgtcggcaatatctggctgtcggcggcggcgcagctggtggcgggaagctggctggggttaaaaatcgcctcccgctggctggcgcgtttaccggaccgctggcatgtgcgaatttatccgctattgctgattgccgtactgctggtgatgagcgtgtggggataatgagggacgcggcgctgcgcatccatccgagcgttttgcccgggtcattctgctgtcatttttcttgcgcatgctctcgcgagacgccgtggccgataaaggaaaataaacgatgggtaaaacgctgaccattttcgatctggataatacgttaattaagggcgacagcagtacgctgtggagccgctttatggtgcgcgaaggctgggtaaacgatcccgattacctggcgcgggaagcgatgctgatggacgactatgaccgcggcgaaatgaatatcgccgattatgtggctctgattcaggcgccgctgattggcgtcgcaaagcgggacgtggacgcgctgctggcgcgctgcgtgcgcgatgaaattatgccgcgcgtgtatccccaggcgtgggatctgattcggactttacaggctaaaggcgagcagatgctggtgatctcggcctcggtcagcctgctggtgcaggcggtggcggcgcagctgggtatcgaacaggcgctggggattgacgttgagatggccgacggcggctatagcggcgtgattgccggtacgccgagctatcagcaggggaaggtggtgcgcctggcgcagtggcaacaggcgcatcctgaatactcgggggaggtgaccttctacaccgactcgatcaacgacctgccgctgtgcctgcatgccgatcgcgtacggctggtcaatccgtgcccgcagctggcggcggcgaacgcgcagcaccagtggccggtgctggcgtggcggctgtgatttttcccccgggtcgcggcgtaaacgccttacccgggctactttttcgtgccgtttgggtagcccggacaggtgcgcagcaccgcctccgggaaaaactaatcagctttaaacagcggcaccacgctgccgccgatatagcggcggcgcagccaggcggacagcgtatccatcgccatcaccaccgccaccagcagcagggtaataaacatcactacgtcccagttccacagacgcatattttccgcataaatcaggccaatgcctcccgcgccgacaaagccgagcaccgcggcggaacgggtattcgattcaatctgatacaggctcagcgccaggaacgtcgggaaagactgggtaaaaatgctgaaacggtgcttctgcaaaccgttcgcccccaccgccgtcaggccgcgtcccggcgagcggtcaaccgcctcgtgtccctctgcgtacagtcggcccagcagcccggtatcctgcataattatcgccagcaccccggccagcggcccgagccccacggcgcggacaaaaatcagcccccagatagccatatcgataccgcgcagcacgtcgaacaaccggcgcatcagcagggcgatcgttcccggaatcacgccgcgcataatattccgcgccgccagaaacgagagcagcagggcgatgaccgtcgcggtaagcgtcccggcgaaaacaatcgccagggtaatggcgatttgcgtgaagtaatagcgaaacggccagttgaaaaagtcgtgccagacgaacatccgtagcagatagcggctgatttgctgcagccccgtggcgagctgctcgccgctgatgccgaactgcataaagaaccagacatagtagagggcgctggccagcgtcagcaggccgacgtagcgcagatagcgcccctgggcctggtataaatgccgatgctggcgacggctggcggcgatatccggttgattttgccactgactcattttttcccctccagaacccactgccgcaggcggccggatagcatatccagcagcgataccacgataataatcaacagcagcgtgatgctgacctgatcgtaccggtccagtttgatattggtcatcagctcctggccgatgccgcccgcgcccaccagcccgaggatcgttgaggagcggaagttaatttcgaggcgcataaagccgtaggagagaaagatgggtttcacctgcggccacagggcaaagcggatacgctgcagatgcgacgcgccgcaggcggccaggccgcgtaccggtttatcctgggcgctctctaccgcttcatagtacagcttggtcaggctaccgatggtgtggagcattaatgccagaaagccggggatcgccccgataccaaaagccatcacgaagatcaccgcccacgccagctccggcatggtgcgcagaaaagccaccagcacgcggacggcaaaacgcagtggggcaggggaccaggcgttgttggccgcaacgaacgccagcagggtggcaatcgccaccgccaccagcgtggacgccagcgccagctgcagcgtttcccagataagcggcagctgaatgggcagacgatagccccagtaagccagagagcctttagtgtgcgaatcggcaaacaggtcggcgacgtgcagcgtcggcagcgtctcaaacatgtaatcgagaaaattgggcagcgagtaccagatagtaaagagattaaactcggccatactgccggcggcaaaatagagcgccagcagcagcagggaccagctaaaggtgtcgcgcttttgccgcgagcggacctgctggtaatagcgttcgaattcggtatgggtattattcatgcgtcgctgtgtcttcaacgagtcgccgccgcccgcgagactggccgggcgacggcgtcagggcgggattaacgcgcggtaaccagttcgcgtttcatatcaatgatctgctggaaatcggctacgctgcccgggccgatatgctgcgtgccgcccatcgctttgataaagcaggcgtgatcgtcggtatccagctttttaatcgcggtgacgactttagccttaaagtcggcaggcagggaattgctgaccaggattgggccgttcgggatcagcggcgattgccaaataatgcggatttgcttcatcaaatccgggtgatccatgcgaatcagtcggttgaaggcgccgacgctgtagccgctattataatcacccaccatcgaggtccaggtcaccgcgccggcaaactgaccgttcagcacgcccagaatatcctgctcgtggccgccggagaaggtcacgctggagaagaagttattatatttattatccgaggtgccgccgaactgctgtttaaaggcgtggttgggaattaaaaagccggaagtggagtccggatcggcgaagccaaacgctttgcctttcagatcttctaactttttatacggactgtcggctttgacaatcaccaccgagtgatagccgcgggactgatctttatcatctacggcaatcccgacaatatcgacggctttagggttgttaatataaacggaagcgtatgatgacggcgacatacttaagaccacgtcaacttttccgcccagcaatccctgaatcacgccggaatagtcggaagagttacgtaattttgtatcgaccttcagctccttatcaaggaactgtttaacgcactggttatcaccaatttgttgggttgcgttctgaccgccaaggatgcccagatttaattccttcggctgttcagcagcgcttgcctgccacgccatcataatgcctgcaaccgctgcggataaacgaactgcgccagtgatgtactttttcattattttgcccgtgtgagtgaaatttaatgcaattggctaatttcatcgccgtacagccgatgcagaatatcctgattcagctgcgtgggatgatcgtcaaaaataatcttgcccttggctacgccgatgacccgcgtgcaatattcacgcaccagctccaccgaatgcaggtttaccatcacgctgataccctgttcgctaatttcgcgcaggacattcataatccgctgcgtatttttcgggtcgagggaagcgaccggttcatcggccagcaaaatacccgggttttgcatcagcgcccggcaaatcgccacgcgctgcatctggccgccggagaggttttccgcccgctgtagcgcatgcggcagcatattcatccattccagcagggagatggcgcgggcgcggtccgcgtcggggaaaactttgaataatgatttcagggtggaggtctggctcaggcgacccagcagcacgttggtcaaaacgtcgagacgcgggaccaggcagaaatcctgaaagatcatgccgcactggctgcgccaggcgtttagcgcgcggcccgacagctttgatacgtcctgcggcgtacccacttccggatagctgaggatctcgccgccgctggcgctgtgggtaccgttcagtacgtgcagaagcgttgactttccggcgccggagcggccaatgacgccaaccagctcgcccgcatgaagatcgaaactgatgccgtccagtacggtttgctgcgcgctgtaggatttgctcaggttgcgtacgctcaggaccttacgctgccggtcgataaagggcggcgtaaacggttgataatcggtttctgccaccgcagccagggaactgttcataaatgcgtccaggttcgtcagtaaactgggcactattaatggtgttttatatgactgccggatgacagtaaggcgaacaaatagtgaacggatgcgaaagctggcctatttgttggaaaaaaaattcatcatggatcacacttttgcattagcaatcgggcatctgagaatactctgcctacctttaatacgcgatagcgcatgagattaataatgatacgtatttcatctgataaagatgacgcgttttatgcgacattagccgggtaatgctatcgccgcgggtacaacgggacgactctggacgttcgtgcaattcttatatctgagtcggtttaaccgagtagataatcttcaggtactggattacgattcgcggcggaaaatttttagtcggcgactatcccttttgtgcggcgtgtaattccattatttacgctaattaatgaaattaaccactgattttgtgttgtttattggttttatattcttattttttgaatttgttcggttttttcgcttttttaaataaaagtgcgattaagaatagtcttaacaactaatggctaagatcctggaacatataatattcacttaagaatctacgcatatcccaccaataaccgtatgaaaaccaatggtttttgtgtttaactcaatatccttatttttattcttctgacttaaattgacctggtcggtaattagccctttgcgcacttattgacacacatggagaaaaatcctaaatttggtaacacaagaaacaagcaagtcatttagtgctctttatctctagcaatactattttgaattttgattgaatatattaaagagggaatttgctgacttagactttgcaggcctgggctatcagcagtgttgcgatacgttcaagatttccaggactatggggtttaactttatatggattataaatattctttggaccagtgcatctggccagcgcatgacagctattttttaaaaggactcgctgagctaattattgatattgatgacctgatttacctgtcgcttgaaaaggtacgccgggagtttgtatttattaatcttagcgccagttcgctgaactattttatccgccgcgatagcgagtggctggctgaaatgaaaggcaagcaaattgtattaattgccgcgaggcgctcggaagcgctggccaactactggtattacaatggtgctattcgtggcgtggtctatgtggacttagccaaggatattcgtcaggagctggcatacgttatcaacggccgttttctacgtaaagatataaagaaagacaaaattaccaacagggaaatgcaaataattcggatgacggcacagggaatgcacccgaaatctattgccaagattgaaaattgtagtgtgaaaacggtttatacccatcgacgaaatgccgaggccaaactgtattcaaagatatataagttagcgctgtaattagtaataaacgttgtttttaaaattgtgcaccgggtcgtaacacccaaaataatttgcgtcgcagataataatgatgcggcctgaactatggcgggaatgcacacagacgtgggacatcaggtcccttaataaactcaggatgaaaaagctatgaaaaaaaaggttcttgcaattgctctggtaaccgcgtttgccggtatgggtgtcgctcaggcagctgacgttactgctcaggcagtcgctacctggtccgcaaccgccaaaaaagacactaccagcaagctggtggtgactccgctgggcagcctggctttccagtatgccgaagggattaaaggctttaactcacagaaaggcctgtttgatgtggctatcgaaggcgatgccaccgcgaccgcattcaaactgacctctcgtctgatcaccaacaccctgactcagctggatacctctggttccaccctgagcgtgggcgttgactacaacggcgctgcggtcgaaaaaacggctgacaccaccatgatcgacaccgcggcgggcatcctgggcggcaacctcagcgcgctgtctaacggctataacgtcgccggtcgcaccaccgctcaggacggcttcacgttctccatcatcagcggcaccaccgatggcaccactgccgttactgactacagcgctctgccggaaggtatctggagcggcgacgtcagcgtacagttcgacgcgacctggaccagctgatcctctcgtagcaccaggcaggggggctccccctgccttatttcacggattgaattcatatgaaaaaacacattctggccatcggcctgttgctcagcacaatgacgccagccctggcgctggatgtgggcgatatctcttcatttatgaacagcggcagcagcacgctgagcaaagagatcaagaacacgaccgacagcggtcgcttaattaacatccatatggaacgcctctcttcgccgctggacggtggcaaggtgatcccgatggataagcaggacgagattttactgacccccgccagtctgctgctgcccgcgaaggccagcgacgtgatccgctttttctacaaaggcccggcggacgataaagaacgctattaccgcattgtctggttcgatcaggcgctcagcgatgcccagcgcaatggctcgacccgcagcgcggtagcgacggcctcggcgcggatcggcaccatcctggtggtcgcgccaagaaaagccaatttccgctatcagtacgccaacggcacgctggtcaataccggtaacgcgacgttgcgcattcttgcctacggcccgtgtctgaagccggctgacggtaaagagtgcaaggaaaattatttcctgatgccgggaaaagaacggcgcttcacgcgcgtgaatgtggcggataaaaaaggacgggtcgcgctctggcagggcgagcagtttgttcccgtgaaatagacatttcttctgacggatcaacattatggctctaccagggaacgctccaggattaaaaacactccttgcctccggcatggtcattttgctggttccgtttagcgtcactgccgccaccgacaaagtacagcaaatcggcggcgtgattatccctcaggccttcagccaggcgctgcaggacggaatgagcatcccactgtttattcatcttgaaggcagcaccggtacccaggacgatcagcggatcggcaatgcctttatctggctggataatggcgttctgcgcgttcggcaaattcagctggaagaaaacgataataacgccaccgtcagcgagcagacccgcaaacagctgaccgcgctggccaatgaagctttcagcaaagatcttaacattagcctgacggatgacgcccggctacagctcagcctgcgccagctgctcctgcagctggtggtaaaaaaagaggcgctgggtacggtgctgcgctcgcgcagcgaagatatcggtcagtccagcgtcaacacccttagcagcaccctgaactataacctcggggtctataacaaccagatgcgcaacggcggcaataacacctccagctatctgtcgctgaacaacgtcaccgcgctgcgcgagcaccacgtggtgctggacggctcgctttacggtattggctccggcaatcaggacagcgacgtctataaagcgatgtatgaacgcgactttgccggtcaccgctttgcgggcgggatgctggatacctggaatttacagtcccttggcccgatgaccgccgtttcggcagggaagatctacggcgcttcctggggcaaccaggccagttcgacggtgttcgataacacccagtcggccaccccggtggtcgcctttttacccgccgccggggaagtccatctgacccgcgacggacgcctgatgagcgtgcagaactttgccatgggtaaccatgaagtcgacacccgcggcctgccgtacgggatttatgatgtcgatgttgaagtgattgtgaacggccgggtggtcagcaaacgcacccagcgggtcaataaattgttcagccgcggacgcggcgccggcgcgccgctggcctggcaattctggggcggcagcttccatatggatcgctggtccgaaagcggtaaaaaaacgcttccggcaaaagatagctggctggcgggggcctcggcctccgggtcgttcagtaccttaagctgggcggccaccggctacggctatgataacaacgccgtcgccgagacgcgcctgaccctgccgatcaccgagtccattaacgtgaacctgcagaatatgctggccagcgacagctcctggagcagcatcggcagcatcagcgccactctgcccggcggctttagttcggtgtgggtcaaccaggaaaaaacgcagattggcgaccggatacggcgcagtaatgccgacaaccgggccatcggcggcacgctgaacctcaattcactctggtcaaagctgggtaccttcagcgtcagctataacgacgaccgccgctataacagccattactacacggcggattactaccagacgctttacaccggctcatggggatcgctgggcctgcgcgcgggcgtacagcgctttaataacggcgacagcagcgccagcaccgggaaatatattgcgctcgatttctcgctgccgctcggcaactggttcagcgccgggatgacgcaccagaacggttacaccatggccaacctgtcggcgcgtaaacagtttgatgaaggcagtattcgcaccatcggcgcgaacgtttcgcgcgccatttccggcgataccggcgatgacaaaaccctcagcggcggcgcgtatgctcagtttgatacccgctactccaccggtacgctgaatgtgaacagcggcgttgatggctatgtgaacaccaacctgaccgccaacggcagcgtgggctggcaggggaaaaatatcgccgccagcggccgcaccgacggcaacgccggggtgattttcaaaaccggccttgaggatgacggcaagctcagcgccaaggttaacggccgcattgtgcagctctccggcaaccgtaattacctgccgctgtcgccgtacagccgttatgaagtggagctgcagaacagtaaaaactcgctcgatagctacgatatcgtgaccgggcgtaagagccagttgaccctttatccgggcaacgtggcggtgattgagccggaagtgaagcagatggtgacggtctccgggcgtatccgcgcggaagacggcacgctgctggctaacgcgcggattaataaccatatcggtcgtacccgcaccgatgagaacggtgagtttgtgatggacgtggataaaaaatatcccaccatcgatttcagttacggtaaaaaccagagctgcgaagtggcgctggagctgagccaggcgcgcggcgcggtgtgggtgggcgatgtggtctgtagcggcctctccacttatgcccgcacgcagcagacaggagaaggtaatgaaagctaaatggctggcatgtttagtgatgttcacggcggcgctgtgcgtgacgcgggtcaacgccgcggtcaccaaaaccacctggccggatgcggcggccatgcagtttgttttcgtggaaaacaactcggacgataacttctttgttaccccgggcggcgcgctggacccgcgaatgaccggggctaaccgctggaccgggctgaaatataacggctcgggcaccatttatcagcagagcctgggctatatcgacaatggctataacaccggcctgattgccaactggaagtttgatatgtggctggataactcccccacatctcatccgttacaggggctgcgctgtatcaactggtatgcgggttgcgacatggccaccagcctgattctgccgcaaaccagcgatgccagcggtttctacggcgcgacggtgacctccggcggacaaaagtggatgcacggcatgatgtccgacgctttctaccagtatctgcagcagatgtcggtgggcagcagtttctcgatgaccatcaactcctgtcagacttcggtgaactatgacgcaaccagcggcgcgcgctgtaaagatcaggcttcaggaagctggtacgtgcgtaaagtcacccatactaaagcggcaaacctgaagctgattaacacccatgcgctggcggaagtctttatcaacagcgacggggtcccgacgctgggcgaggggaacgccgactgccgcacccagactatcggctcccgttccggtctgagctgcaaaatggtgaactacaatttgcagcacaatggcctgagtaatacctcaattcatatttttccggcaatcagcaactcggcgctggcttccgcggtcggaagttatgatatgcagttcagcctggatgggaattcatggaagccggtgagcggcatctcccagtactatacgtttaatgagatgaaatcatctgactcggtttacgtatttttctcgagcaacttttttaagcagatggtcacgctgggcatcagcgacgtgaacaccaaagacctgtttaatttccgtttctataacaccacctcgccggagtcaggctggtacgagttttcgacctccaacaccctgattattaaaccgcgcgacttcagcatcagcattatttccgatgagtacatttcggcgccgacgcgcgaaggctacgtgggcagcggcgagccgtcgctggactttggctatattgtcaccaccagcggcaaaaccgccgccgatgaagtgctcattaaagtgaccgggccaacgcaggcgatcggcggacgttcatactgtatttttagttcaccagacggcacgtcgagagtaccgttcccggcgacgctggcgtttacgacgcagaccgggaccatcaaaacctacgatgccggatgcgatgatacctggcgcgatatgaccgacgccctgtggttaaccacgccgtggacggatatctccggcgaggtcggtcagatggacaaaacgacggtaacgttttccattccgatggataacccgatatcgctgcgcacggtggaagataacggctggtttggtgaagtgagtgcttcaggagaaattcatgttcaggcgacgtggcgtaacattaactaatttgctgcggatgcttatctgcctgctgtcgctaggattggcgaccgcggcgcaggccatctcggtgggtaatttaactttctcgctggcggcggaagataacttcgcgtctaaacgggtgattaataacaataaaagcgcccggttgtatcgggtttctattgtcgctatcgaccgccccggcggcaaagaggtgcgttctcgcccggcggacggcgagctgctgtttgccccgcgtcagcttaccctgcaggcgggggagagcgagtattttaagttttactaccacggcccgaaagatgaccgtgagcgctattaccgggtctcctttcgtgaaatacccacccgcaattacgtgatgcgcaataaaagcggtaccgaggtgagtatggatccggtggtggtgatggacacgattctggttgtgcgcccgcgcgaggtacggttcaagtgggcctacgatcgggcggcgggcaccgtcagcaataccgggaatacctggtttaagctgctgatcaagcccgggtgcgatacgacggaagaggaaggggatgcatggtatttacggcccggggacgttgttcgccaggcctcgctgcgccaaccggggaaccactacatcatctataacgataaatttataaaaatgaccaaagactgcccggtgaactaaccgggcagcttttttcgcgcttcgtcgctaaaccgtacgcccggcatagcggcggttcgccagcaggctcaggccgcagcacagcagataataaaccgcgccggtaaagacaaatatcgccagcgggtaaatttgcacccggttattgacctgcccggcgacggtggtcagttccggcacgttgacgataaacgccagcgacgtgtctttgagcagcccgataaatatccctaccagcgagggctgaacgttgcgcagagcctgcggcagcagaataaggcgcagcgtctgtccgggggcaaaaccctggatcagcgccgcttcgtactgcccgcggggcagcgattgcaggcccgccagcaccgagtgcatcaccgacgcggcggtaaaccacgccagcgccaccgtgacggtgaccgcgcccggcaggtcgctgccggtgagcatggggagcagataccacagccagaaaatgacgaagatcagcgggatgccgcgaataatctccgcccacaggaagagcagccgccgcacgatcccgtcgtagcgccaggcgatggccgccagcagcacgccccccggcagcgccagcgcggcggcaccgatagccatcagcagcgtcagcaccacgccgccgggaataccgtccgccagccgtccccacagcagataatcgaggttatcaacgataaccgccaggttagcgttcatagccggctctcctttgctgatctcttcccggaccgagacgcgtcagcgccacgcccatgagcaccccaagcgccagatacagcgcggtgccgacggcaaacgcctccagcgcatgcgcgttgtagctctcgatttgccgcacctgataggtcagttcggcgaagccgataccgctcgccagcgaggagagcttcatcaggttcagatactggccgataatcggctgccaggcgttagccagcccctgcggcagcagaatgtggcgcagctcctgccacggcgtaaacccctgcgacagcgccgcttcccgctggccgtggctaacggcgcgcagcccggaggcgatctcttcgatcagaaacgccgaagtaaagaccccgagtccccacattgagcagagaaactccggcgtcagccaccagacgttgcccggcagaatcgaccagctgtggtcgtcgttgataaaatctcgcgctcccagcggcagcagattccaggcggcaaaataccagaacagcagctggaccagcagcggcgtattgcggaacagtgaaacccaggccgccaccagccagcggccgggcctgccgcccccgagacgcagcgccagcagcaggacggccagcacggtcgccagaatcatccccgcgacgctgacccagacggtggtgagaaaaccggagatgatccactgcagcggctgcccgctcagcacgccatgccagtcgagatgtgggatcacgcctcactctcctggtgcagcggatcgagcaccttctgcaggaaacggcgggtgcgggcgtgctgcggccgggcgaaaaactcggccggcggcgcgacttcgagaatatcgccgccgtcgataaacaccacccgatcggcaatctcgcgggcgaactgcatctcgtgggtcaccaccaccatggtgatcccgctgtgggcgagggttttcatgacctgcagcacttcgccgatcatctccgggtccagcgccgacgtgggttcatcgaacagaatgatctgcggcgaggaggcgagggcgcgggcgatcgccacccgctgctgctgaccgcccgagagctgggcaggcatctgccgggctttatccgccaggccaacctggctgagcagcgccagcgagcgctcgcgggcggcgcttttgctccagccgtgaacgcgttccagcgcgagggtaatattctcctgcgccgtcaggtgggcgtagagattaaactgctgaaaaacgaagccgacccggctgcgcagctggcgcagggcgctgccggtaagctggcgcgtcggtttgccgtcgatcagaatctcgccgccgctaagggattccagctgattgatcaggcggatcagggttgatttgcccgatcccgaagggccgaggatcgccactacttcgccgggttcaacctgtaaatttacgccgttcagcacccgatggtcgccgtagcttttggcgacatcgcgaaactcaatgctggcgcgctgcagatgcgaaaaatccgcggacgatgccgcggagcgtgaaaatagagccgataacatcatctttctctgcttatttcgcttcgatagtaaaggcgcgcggctgcggggttttggtgctcgggccaaaccagacgtcgtaaattttggccgcttcaccggttttttccagcttgaccagctcgtcattgaccgctttcagcagggccggttcgcctttcttcacgccgacgccaatctcttctttgctcagcaggtcggggatgattttgaagtttgccttgtccggcgcttccgccagcagtccggcgaggatggtgctgtcctgagtgatggcctgcacgttgccgttgcgcagggcggtcagcgccagcggaatatcgtcataagagagcacgcgcgactgcgggaaacgctgatgcagcgcctgttcgccggtggtgccttttaccgcgccgatgcgcgctttgctgtaatcatcgagcttatccggcgattttgccgggacgaggaactgctggccggtcacgaagtaaggcgttgagaaatcaatcacctgggcgcgttccggggtgatggtgatatcggcgacgatcaggtcggccttaccggattgcagcagcggaatgcggttggccgggttggtggcgaccagctccagcttgacgccgagcgactttgccagcgcttcggcgaagtccacgtcgtagccgacgattttatgcgttttcgggtctaccgagccgaacggcgggttggcgtcgaaggtggcgactttgaccacgccggcggctttgatatcggctagttgatcggcctgagcctgcgcggcgagcaccagcatgcccagcgccagcgcgatttttgtttttgcaatgcgcattgttattcccctgaatccctgttttgttttgtgtttatcacgctcccacaaatcgcccgtcggcggcaaagaagaaaaagttcttatctataacgaaaaagaacttaacaaagttgtggatattgtttaaccggcactgtgctaccaaactggggagacattccgtcagctattggtatctttctgaaatcacaagactcgcagcgatgccctggtgcccgctgaaatcggcgaaccggaggtcggaagacaagggctggccgccagggatggcggccagaggcgaatcgagacagcgatgtcgagttgagccgaccgcaggctgaggaccgggaggtgagcgcagtgcgcagcaccgatttctttgcgggaccgcggggattgtaaagggggagacggttttctccccctttacccgttcacgggtagcggtgaggcattttctgcagattgcgagtaaacggaacccttacgcatagaattacaaatcaggcttcggcaaacgctgcgggtccttcccagcctgcgctgcgcttggctgggctacggggcctcagtcgtctggggtcgtgtagcccggataagacgtttacgtcgcaatccgggaaaggcccctaatatgcgcccgacagaattacaaatccggaattgatatttcccgcccgccgtcaactgtggttgaaatagacacaggcaaaaatgcttcccgacggaggagaaaaatgaaagtggcgctgtggcaacgcataacgggctggctggcttctttatctggatccggcggtgaagccggtcagcaggatacccaacgcatcatggaggcaatattaccggtcgccagtctctacggaattgagctcggcaacgttgaaacaaggtggtttcgccatgataaaacatactgagcggcgcaggacgcgtgaagcctactggaacgaggtgtgctttgtgtagcgcgaggctgtttgcggttgcggcgacgcaggaagcgaagccgcagccctgaacagctttatccccccagatacatccgtttgatttccggattcgccagcacctccggcgccggaccagagagcataatcttcccattctccagcacataggcgcgatcggcgatggtcaacgccgccgtggcgttctgctctaccagcagcacggtaatattctcttcccgcagctgcttaatcgtcgcaaacagctccccgacaattttcggcgccaggccgaggcttggctcatcgagcatcagcagtaccggctcgctcatcaacgctctggcgatcgccagcatctgctgctcgccgccgctcatggttcccgccatctggctgtgccgctctttcagccggggaaacaggctgtacatgcgatcgcgcaggcgggtaaagccggcgagattgttgtaggcccccatgcgcagattttcttcgatggtcaggttggtaaagatgcgccgtccttctggcaccagcgccagccccttacgcacaatctgatgcgtctggctgcgggaaatatcctcgttgagaaaattgacccgccccgtggaacgcaccagattgacgatcccgttgagggtggaggttttccccgcaccgttgctgccgataagggtcacaatctcccggtcgtgaatatcaatatccacccctttcagcccctgaatcacgccgtaaaacacttttaactcgcgcgcgctaagcataacgaacgtcccccaggtaggcggaaatcacgtccggatcctgtatggcttcggacatcaggccgctaaacagcggtttgccgtactccagcaccatcacccgctcgcacagcttgttgacgaacggcatatcgtgctcgatcagcagtacgctgagctgatagtcgttacgcatgcggaagatcagatccgccagatcctccgtctctttcgggttcatcccggcggcgggctcgtcgagcagcagtaattttggcgacgtcgccagcgcgcgggcgatctccaccttgcgctggttgccgtagctgaggttggtggcctgcacgtcggcgaaatgggcgataccgatatcgtccagaatcgccatcgctttggcctttgccgcccgctcggcggggaagtagcggccaatatgcagcgccgcttccagcagcgaatagcggctggcgctgtcgaggccgaccatcacgttttctaataccgtcatcgagttgaacaggcggatattctgaaaggtgcgggcaatcccggcgttgaccacccggttcggcttcagccccttcagcgactttcccgccagggtcacgctgccgctggtcggcttatagttggcggtgatgacgttgaacatcgtggttttgcccgcgccgttggggccaatcaggccaaaaatttccgcttcgtcgacgtggaaactgacgctgtcgatggcccgcaggccgccgaactgcatggtcacgtcctgcacctgtaaaatgaccttattttgcgccatagccgcggccccttttgcccacttgccaaatctcttttttgcccagcagaccttcgcgggcgaacagcatgatgatcagcagcagcagcgagaacaccaccatccgcaggcccggatacgcgccgagatcgtgaccgaagaactggagcggctggtcgagaaagcgcagccactcgccgctgccgaccaccagtacggtgccgagcagcgcgccggtggtgctgcccaggccgccgagcacgataataatcagcagctggaaggtgagcataaagtcgaacaggcccggcgagatggtggtcagcagcgaggccagcagtccgccgccgatcccttcaaagaaggcgctggtggcgaaggcgcaggttttaatgcgaaacgtgttcacgcccatggcgatagcggcgtcttcgtcgtcgcgcaccgctttcatcattcgcccgtacttcgaccacaccagctgcaaaatcatcccggtcgccagcagggcgaacagcccgcaccagaacaggagatgcggctgctgcggaatatcgttgaggccaatcgcgccgttggtgatctgcggattgttgatagcgaggattttaatgataaagccgaagccgagggtcacaatcgccaggtagtcgccgcgcacgcggaagaccggcagggcaaggcaaaccgccagcgccgccgcgcacaggccgctaatgagcagcgcgggcaggaacccggcgtgcagcacgaggatccacgggctgggggcggccatctcaaacatatccagcttgctgtcactggggaggatcagcagggcggtgacgtaagcgccgaccgccacaaagccgttgggctccagcgacagctggccggtcacgccgttgatcaggttgtagctgaccgcgaggatcataaagacgaaaatggtgctgatgacgcgagtaatgtagtcgttgaagacgacgttgatcccggccagcagcgcgacgcagagagcaataatgaccaggttgcgcagctgcgccccggcggtagtcgtagcgttgagcatcagaaacggctcctttccagacgttcatcgcccataatgccaaccgggcggaacaagaggaccagaatcaagaacataaaggcaaaggcgtctttgtaaccgcccagttcgggaaacagagcgaccgccaccacctcggtaaagccgagaataaagccgccgagcaccgcgccggtgacgctgccgattccgccgagcaccgcggcggcgaaggccttcaggccgatcagcacgcccatcagcgggtcgatggtcgggtagctgatggagtagaacaccccgcccagcgccgcgaggctgctgccgagggcgaacaccagcgagataatgcggttggcgtcgatgcccatcaggcgcacggtattaacgtcgaaggccaccgcgcggatcgccatcccgtagcgggtgcggtacagcagccagaggatcgccagcagcagcaggacggtgatcagcggcacgatccacgccacgttggtgataatcacgtcaccaaaggcgcgggtgttgttgaaaaattccggtgcggaaaagaagcgcgagctgccgccaaacagcacgttgaacaggttttcgaggaagaagctgacgccgatggcggtgatcagcatggagatttttgatgcctgacgcagcgggcgataggccacccggtcgatcagcataccgaacaggccgcacagcgcgagggtcaggaaaacggctaccccgaagggtagcccaatggaagaaaacaaaaacagggtggtaaacgccccgaccatcattacgtccgcatgggcgaagttgatcaggcgcagcaccccataaaccatcgtataaccgatggcaatcagggcgtacatgcccccaaggctcattccattgaccacttgctggagaaaaatggcaccatccatctgatatcccttataaaaccttaaggattaaccacggtacgaaacgccagcttgccatccttcacttcgttgatgaccgcgctgcggatagcgtcgccgttttgtaacgtcagcgtgccggttacgccctggaagtccttagtggcgcgaattttttcgttaacgcaaacccggtcgtgcgggtcgctgcactggttcatggcgttgataatgacgttataggcgtccgccgccatcgcgccccaggtgtgggtcggctgctggtatttggcttcccaggctttgataaacacctcgcccgccggcgtttgctctttggcgttcggcgagtagtagtcggtggtcatatagccgttgaccgcgtctttgccgacgtcaaaaaagacctgatccgccgccagcccgtcgccgccgaccaccggcttgctcagccccagctgcttcgcctgtacggcgatcagcgccccttcggtgtagtagatcggcatatagatcatgtcgacgttcttcgccttcacgctggccagctgggccttaaagtctttgctgccgccgggagcctgaacttcgataggaatggcgccgccgtttttcaggaactgcgtgcgaaaggccttcgccaggccgacggagtagtcgttgctgctgtcgaagacgatggcggcggttttggctttcagatcgcgcgaggcgaggttagcgccgaccacgccctggaagctgtcggagaagcagacccggctgacgtaagggtggttgcgggtaacgcggtcgttggtcgcggttgaggagaccagcggcgttttgctgtcgtcggcgattttggtcatcgccagggtattggaggaggtgacttcgccgatcaccgcatcgactttatcgctggaaaccaggcgctgcatggcgttagcggcttcgaccttatcgctcttatcgtcgatcacgataagcttcacggtgtcgccgttttttaacgtcggcgtaatgctctggataatatccagccctttttgcgaaggctgaccgtagccgctcagcgcgccgctcagcggcaagaccacgccgattttaatttcagccgcctgcgcgctgctggcaccgacccacgcggcaaccagcgtggccattaaagacgctttcccggaaaacttgttcattgttacctcaccgtcggtggattatttatacccttcatacttcaagttgcttgtgcgttggctttcctcgctcaccccagtcacttacttcagtaagctcctggggattcactgcgtcgccgcgtgattcgcccctacgggactcaccctttcagggccagcgcaagcgctgttcaaaacggttaaccgttttgtcccgcaactcgaattattttgggtatatctttaactatcaatgactgcataacattgagacataattcgccagcgtatccggcgaattattggctgttatgttgaatagataacgagatatatttggtatgcagatttaccttacaacgtccgtttcgtttttactcatgcaatattcttattacctccagaagagggcataaggctggtgaaaatactgttattggtacggtaaacgcattttgccaggtggcgtctgacaccttacccggcctggaaagcccgcaatttcagcgcgcacccgaatataatattcaggtgcgctcgataatattaaaaatctattctgctgcccgcgtgacttattattttaactggctcaacggttttatttttccatgcagcgccggattatcgctttcgtctttcaggcgcactccggtaagccgccgcaaaaaggcctgctccagtagccaggccagcttaaaagcggcggcatcaaagctcagtccttccggacggatattagaaatacagttgcgctccgactccagccgctgacgatgcggctgccaggttaaatacaccccgaggctatccggcgaggagagcccgggcctttcgccaatcaatatcgccaccgctctggccttcagcgtttcgcctatatcatcgcccagcgcgacccgcgactggtgcgccagcaccaccggggccaggctcaggccgagggttttcagatagggcagcagggcgcgaatcagcggcaccgcctggcgctgcacggcgtacgacgacagcccgtcgccaatcaccagcagcaggtcggcggggcgcgcgccgctggcggcgaggtcggcgcggctctcttcgttcagctgtcgccccagatccgggcgattcagatagacatggcgatcgctggcggcgctgcggacggtcagcgtcgacagccccagctccgccagcggctggactaactggtcgctggcgaaaggctggtgaatggcatcgcgcgcccgggcgtgggcgaggccgaaattcagcacttcgcgggtcggcaggctggcgccgctgcgccccagcgcaatccgcgcatcggtaaattcacgcagcgggttccaggcgtcgggaggattcataccggttctccttgcggcaggacggaaagcagcggatggcgggcatcggtcagacgcagcgcgccgtggcggtcaataatttgcatcttcgtcagccagtcggcgaactcaggcgcatgctgtaaacccagcagtcggcgggcgtaaagggcatcgtggaacgaggtgctttggtagttgagcataatatcgtcagcccccggaacgccgatcaaaaaggtcagcccggccgcgcagagcagcgtcagcagggtatccatatcgtcctgatccgcttcggcgtgattggtgtagcaaacgtcgcagccgatgggcagccccatcagcttgccgcagaagtgatcttccagcccggcgcggataatctgcttaccatcgtacagatactccgggccaataaagcccaccaccgtattgaccagcagcggttcaaaatggcgggcgacggcataggcccgggcttcgcaggtctgctgatcaacgccgtggtgggcgttggcggaaagacagctgccctggccggtttcaaaatacatcacgttgttgcccagcgtgccgcggttcaggctaagcgccgcttcccgcgcttcctgcagcagcgccagattaatgccgaaaccgctgttggcggcttcggtaccggccaccgactggaacaccagatccaccggtgcgccgcgctcaatcagctgcagggtgttggtgacgtgggtcaaaatgcacgactgggtggggatggcgaagcgctgaataatatcgtcaagcatatggttcagctgcgccagcaccggcaggctgtcgctggccggattgatgccgatcaccgcgtccccggcgccgtacagcaggccgtcgagcatgctggcggcgatgcctttcatatcatcggtcgggtgattgggctgcaggcgcacgctcaggcgccccggcaggccgatggtattgcgaaaacgggtgacgacccggcatttgctggcggcgaggatcagatcctgattgcgcatcagcttgctgaccgcggcggccatctccggggttatcgcgcgggcgacctggcgcagcgccgcttcatcggtggcgtcgtcgagcagccagtcgcgaaaatcgccgaccgtaaggtggcgaatcgccgcgaagccccgggcgtcgtgggtatcgaggatcagccgggtcacctcatcctgctcgtagggaatcagcggattatcgagaatctccgtgagcggaacctccgccagcgccatttttgccgccatccgctcttcggcggagccggcgataacgcccgccagcgcgtcgccggaacgcgcaggggaggccttcgccatcaaggttttcagactatcaaagcgccatacctggcccgatagcgtggttttatacatgtgtcgcctcctcaggagaccgtacgcagctgcggatccaccgccgcgcgctggcgggccgctgcggtcttgcgaaaccacaggtagctgccgagcatcatggcggcgaaaatcagcgccagcagggtgttgtaccagaccatcgccaccaggcagagtaccgccatggccagcgcgaaggccggcgcccacggatagagcggcgcgcggaacggtcgaatcagcttcggctcgctgcggcgcagtttaaacagcgccgccatcgaggtgatatacataacaatagcgccaaataccgacatcgtgacgatacaggcggtcagcggcatcccgctaatggtgatcagcgaatcggagaaaatggcggcgatgcccaccacgccaccggcgaggatcgccagatgcggcgtgcgggtgcggcggttcagcgtcgccaggctggcggggagatagcccgcgcgcgccagcgagtaaatctgccgcgagtagcccatgataatcccgtggaacgaggccaccaggccgaagagtcccagccacaccagcatatgcagccagccgctgctgttgccgaccaccattttcatcgcctgcggcagcgggtcgttaatattggccagggttcgccagtcgcccacgccgccggcaaaaatcatcacgccaatcgccagcacggtcagggtcaggatgccgccgcccagcgcccggggaatggtgcgctgcggatccttcgcctcttcggcggccatcgatgcgccttcaatcgccagaaagaaccagatagcgaacgggatggcggcaaacatccccggcagcgccaggccgctgaagctctccgcgcccgcccagccgttagcggtaaagtggctccaggagaagcccggcgcgacaacgcccataaacaccagcagttcgaaaatcgctaataacgtcaccaccagctcaaaggtcgcggcgatacccacgccgagaatattcagcgtcataaagatgatgtaggcgccgcaggccacccatttggggtcgagcgccggaaactgcacgttaagataggcgccgatggccatggcgatggcgggcggggcgaagacgaattcaatcagggtcgcgaagccggcgataaacccgccggtcgggccaaaggcgcggtaggcgtaggcaaaaggcccgcccgcatgcggaatggcggtggtcagctcggtaaagctaaaaataaaggcgcagtacatcgcggcgatggccagcgcgacgatcataaagcccagcgtcccggcctgggaccagccgtagctccagccaaaatactctccggaaataaccagcccaacggcgatcccccataagcggaaactgccgagcgttctttttagcgttgtggtttgctctgtcatgttcgttgcctcgccagataaagatatcgggagggttgcaaagagaatgccagggcagcccgcagggggagcgtagcgaatcatcctcgcgtactccgtgtacgctccggttctttcgcgctgtccgtgtccaaactgtctgcaacgattacgcctgttgggataagctctaagccaacgaggatcaaaaaaggggcagactgcgcccggcgagagagtcgccgtggtgcagctgcccgcaaatgtggcgttactggtgcacgatggcgccagcgtctttttgaattaccggacctgctttcacctgcaggttaagtcctttactctccagctcggcgttgcgaatgcgcagaccgcggtcggcttcaatattgacgttgctaaaatggaaaccgctgagcggcgcttccggggtaccgataatataggccgccgctttgctgtcgcctgtggaggttaaattttcaacggtgatattactgaagtgcggagtcttgtatttatcgaacggctgtttcgggtcgctgtccggcggatagatctgttcgccgagggtaaagccgcctgcctgcaacagcttatcgacctcggcctgcacaatcggcgcggctttgtaataggcggagaacaccagcggcacctcaacgttatgcattctggtattgcggtagacgatattttttacctcaccgcctttgccgcgcgggcttttaatccgaataccgtacatcgaaccttcgaaggtattgttttccaccagcacgttattcacgccgcctgcgctctcgctgccgatggagatcccgcgcccctgcttcagggtgttgttggcgatatagatgttatccaccacgccctccgggaagcgcgggtcggctttttccgccttgatggcaatatggtcgtcgttacagtcgatatagttgttggtaatacggatattctggctatcgataggatcgatggcgtcggtattcggcgcatgccacggcgaaagaatacgcgtgccgttgatatcgacatcgtgcgcgtagcgggtgaccacgtggaagctgggtgaatgggtgagggtcacgccgtagataagcacgttgctggcgcgggtgatataaatcagccgcggtcggtcggtaccgcctttcttgccggtggcgcggatattttcccgccagcgctcccaccacaccgcgccctggccgtcgatagtgccttcaccgacgatggccacgttttgcgcgtcggcgatgctgataaacggcagccagccgttttcagcttcggcgtatcgcgttttatcatcgccgcgataggcagccacttcggttgaggccaccagggtggcgtctttctccagcttaagctgaatattattcttcagaaacagcgggttggtcaggaaattaccttttggcaccagcaccgttccccctccggcggcggcgcagtcatcaatcgctttttgaatggcatcggtgttgagcgcgatttgcagccgatggccttctgcgccgtagtgggtgatatcacagattttatcgggaaacttcacggaactcgcggcctgagcggcgtacagcggtagaagaccgacggcggcagcggcggcccacagaggtaaagcgcggggtatcatgacattatccttttttggtttattgttttgtaaaactagcaccaatgttttgattttatgagtgtggcgatcacggtttgtcctttgtcgttattctgcccataactggcgctgatgatttgggcgaatgcatagatgacaggcccggccgctttgcaatttggcgacaggcggggtataaggaatctcttatctggatgtttagatgtctatacgcccatgaggtcaaatgcaaacaacacaacaacaaggtgggcagcttaagcgcaccatgaagacccgccacctgattatgctgtcgctgggtggcgttattggcacagggctattttttaataccggctatatcatctccaccaccggagcggcgggtacgctgctggcctatctgattggcgcgctggtggtctggctggtgatgcagtgtctgggcgaactctcggtggcgatgccggaaaccggggcgttccacgtctacgccgcgcgctatctcggcccggcgaccgggtacaccgtcgcctggctctactggctaacctggaccgtcgcgcttggctcaagcttcaccgccgccggattctgcatgcagtactggttcccgcaggtgccggtatgggtctggtgcgtggtgttctgcgcggtgattttcgcgctcaacgttatctccacccgcttctttgccgaaggtgaattctggttctcgctggtgaaggtggtcaccattatcgcctttattattctcggcggggcggcgatcttcggcatcattccgatgcaggatggctccccggcgccggggctgcgcaatatcaccgccgaaggctggttcccgcacggcggtctgccgatcctgatgaccatggtggcggttaacttcgctttctccggcaccgagcttatcggcatcgcggcgggggaaacggagaatccgcataaagtcattccggtggccattcgtaccaccatcgcccggctgattatcttttttatcggcaccgtcttcgtgctggcggcgctgattccgatgcagcaggcgggagtcgaaaaaagcccgtttgtgctggtgttcgaaaaggtggggatcccctacgcggcggatatctttaactttgtgatcctgacggcgattctgtcggcggccaactctggcctctacgcctccgggcggatgctgtggtcgctctccaatgaaaaaacgctgccggcctgttttactaaattaaccaaaaacggcgtgccgctgacggcgatttcagtcagcatgctcggcggcgtgctggcgctcttctccagcgtcgtggccccggatacggtgtttgtcgcgctgtcggcgatttccggcttcgcggtggtggcggtatggctgagcatctgcgcctcgcactttatgttccgccgccgccatctgcagcaggggaaggcgctaagcgaactgcactaccgcgcgccgtggtatccgctggtgccggcgctgggatttgtgctttgcctggtggcctgcgtgggtctggcgtttgacccgagtcagaggattgcgctgtggtgcgggatcccgttcgtggcactgtgttatggtgcgtattatctgactcgttcacggaaactcacccaggagcctcaacatgtcgcagaataatccgttaaccgccctccttgacgcaaagccctttatcctgctggacggcgcgatggcgacggagctggaagcgcgcggctgcaatcttgccgacagcctgtggtcggcgaaagtgctggtcgacaacccggagcttatccgcgaagttcacctcgactatttccgcgccggcgcgcaggtggcgatcaccgccagctatcaggcgacgccggcgggctttgccgcccgcggcctcgatgaagcgcagtcgaaagcgctgatcggcaaaagcgttgagctggcccgcaaggcgcgggaggcgtatctggcggaaaacccgcaggcgggcgcgctgctggttgccggttcggtcgggccgtacggcgccttcctggcggacggttcggagtatcgcggcgattatgtccgcagccgtgaggaatttcaggcgtttcatcgtccgcgcgtggaagcgctgctcgacgccggggccgatctgctggcctgcgaaacgatgccgaatttcgccgagatgaaggcgctggcggagctgctgaccgcctatccgcgcgcgcgggcgtggttctcgtttaccctgcgcgatgcgcagcatctcagcgacggcacgccgctgcgggaagtgattggtgtgctggcaaactatccgcaggtggtggcgctgggcattaactgtatcgcgctggagaacaccaccgccgcgctggcgcatctgcatagcctgacggctctgccgctggtggtttatcctaactccggggagcactatgacccggtatccaagacctggcatcaccacggcgaagcctgtgcaacgctggcgggatatttaccccagtggctggcggcgggggcgaagctgattggcggctgctgccgcacgacgccgaaggatattgccgaactgaacgcgcggcgttgagtttgcgccgggtggcggctgatgccttacccggccgacaacgtgcacgaatcgtaggccgggtaagcgtaagcgctacccggcatcaatcacccggcatccgctaacacaaacatcccgtacgggtggatttcgagatagtaatgctcgccgacgtccggctgcagccgcgtcgcgttcacctgcagcaaaatttcctgcccgtgccactctaccgtcacctcgtactgcggtcccatataggccacgtgacggatcgtgcagcgctggctctcctcgccgcgatcgctcagggtgatcgcctccgggcggacgccgacgctgccctcgccgtgggcggcaaaatgcggcggcctcggcagccgatagccataaatatcgacgaaaccctcgctgaaggcggccgggaacaggttggcatcgcccataaagcttgccataaagcgcgacgcaggctggcggtaaagatcctgcggcgagccgatctgcatgatatgccccttattcatcaccagcacggtatcggaaaccgcaaaggcttcactctgatcgtgggtcacgtacagcgaggtgatatcaaactgcttttgcagttcgcggatcttatcgcgcatgctgcgccgcaggttggcgtcgaggttacttaagggctcatcaaacagcagcacctttggcttgaggatcagggcgcgcgccagcgccacgcgctgctgctggccgccggagatctgatcgacatagcggtcttcgaagccttccagatccaccatcgccagcgcctccttcacccgcgctttcacatcgccgcgcgacgcgccgagcatcttcagaccgtagccgacgttgtcccccagcgacatatgcggaaacagggcgtaagactgaaacaccatacagatgtcgcgctgctgaatggatcgatgggtcacgtcttcgccatcgatgaaaatctgcccttcgctcggtttttccagcccggcgaccaggcgcaggatggtggtcttaccgcagccggaagggccgagcagggtcaccatttgcccctgcgggatggtgagattgatattgtcgataaccgtgttgctgccgaatcgcttggtgacgttgcgcagttcaacaaaatttttctgactcatagtgcgctccattacgcctggtttttggcttttgaccgggagatacgcgcttccccgatcagccagtcaaagataaaaataatcgccagcatcactacgatcagaatcgatccgtaggcgatcgccacgccgtattcgccgtcttccacccggttgaggatataggcggtagcgacgcgggtgtccggcgtcacgaggaacacaatggcgctgacggtggtaatggagcgcacaaagctgtagatcagcgccgagaggatcgccgggcgcagcagcggcagcaggatatgcgtaatggtgcgcagggaacccgcgcgcaggctgagcgacgcttcgtccagcgatttgtcgatctggcctaaaccggcaatgcccgcccggatgcccaccggcacgttacgcatcaccatcgagataatcacaatcgctgccgttccggtgaggtacaccggcgcgctgttaaaggcgagaatataggagacgcccgccacggtgcccggcaccgcgaagcacagcatggtggtgaactcgatggtctttttgcctttaaactgctgacgcaccacgatccaggcgatcagcaggccgaaggcggcggtgatcggcgcggcgatcccggcgtagagcagggtatcgagcagcgaaggccaggcaccgtcgctcatcccctggccgaacagcttgataaagttatccagcgtcagggtgtagtccacgccccagttaacggtaaagctgccgtagaaaatgctgccgtagagcagggcgttgaaggcgatccacaccgccagaatggcgatcacgctccacaccagggtcaccggcagcggctgcacgtcgccgcgataggacttaccggaaaccgtgacgtacgagcgcttgccgatccacatatactgaatgcagaacaccagcagcgagaacagcagcaggaacgcgcccagggtactggcggcctgataatcgagctgcgaaccggtgatatagaagtagatttgcgtcgccagcacgtcgaagttgccgccgagcaccagcgggttgctgaagtcggccagcgactggacgatgacaattaaaaacgcgttcgccagcgcaggtttcagcagcgggacgaagacgccgttaaaggtctgccagcggctggcgcgcagggtgtacgacgcctcctccagcgacggatgaatggttttaatcgcgccgtcgaggatcataaacgccatcggagtgaacgccagcacctgcgccagccagatgccggtaaacccgtacagccagttggtgttggttaagccgaaccagtcgaccatcagctcggtgacgtagccggaacggcccatcatcagggtgacgccgaggccgacgacaaacggcggggtgacgatcggcagaatcgagaaaatgcggccaataatcgcgctgcgcttggcgatgcgggtggtgtaaatcgccagcaccaggccaaagaaggtgcagccgatgcctaccgcaatcgacagggcgatggagttgaggatcacctggacgatatgcgcctgcgacagcacggccataaacgccagcggggcaaactcgccggcgtcgttggtgaacatcgggatgaaaatggcgatgctcggccagacgataaagacgccgattaacgccacgatggtgaccagcgaaccaatcacaaagcggtcgccgcccagccattccaggcgggtgagcgccagggtcatgatggcgcccagcgcgacaaacagcacgagggtggcgtagcctaacccgcggccttccacggtggcgctgacgacgataaacgccatacagaggagcgcccagccggcgtcgaggtagtggcggctgcgctgctcccggctggcttcctgccatggacgaatcagcagcaggctcggcaggagataccacagccagctgatattgaactgtgaccagccgtaggccgcgagaatttcatcttgcgtggactccagcagaccgtaatccaggctccagctcggcagcagggcgaacgccagccagccgaataaaacccaaaggaatatcgcatcccgctttttcacgggatggagtgcaagtgtgtgtgacataagttttccggtgtcgtaggccgggtagggcgtggatgccgccacccggcaaatgaacgcagtgcgggcttatttacccatcttcacttcgctaacccatttattgatgagcgctttacgcacgtccgttgagccgtatttatccatgtcgtagttgataagcttcaggtcgtcgagcttcagcgagttcggcgaagtttcggcggtagtgttggtcaggatctgataagacttgcctttcttccacgccagctcctgggcctctttcgacagcacccagtcgacaaacagtttggcgttgtcgaggttgcgcgcgcccttcaggatactgacgccgccaatttcgtagccggtgccttcgcacggcgagatcagctccagcggcgcgccctgttctttttccagcgaatagtcgtgcaggaagccgatgccgatggccgtttcaccgcgggcggcgttgcgcgccggggcgataccggacttagtgtactgggagacgttagcgttgagctgtttaagataatcgaaagcctgatcgtctccccacagctgggcgaaggtcgccagcgcggtgtaggcggtgccggagctctgcgggtcggcaatctggatttcgcctttgtattccggtttggtcagatccttccagcattttggcaccggcaggtttttctctttcaggcgctgggtgttcacgccgaagccgagaatgccgacgtacaccgccgaggagtagttgcctttcagcttcgccggatcgcggaactgctccatcacctgcgtaagattcggcgatttatagggctgcagcaggcccatttcgccggcctgggactgcgggtcgagggtgccgccgtaccagacatccgcctgcgggtttttcttctcggcatcgaccttcgccagcgtgctgccggagccgttgcgaataaacgaggtttttacgtcatatttttcgccgaaggctttagtttccgcctcacacatttcgttggtggcgctgcaatagaccaccagacgacctttggcgtgcgccgcgccgcttaacgtcgccagcgcaatgccggaagcaatcagggtagtgaccagcgtttttttcattattttatcctttgagcagcagaggtagtaatgctcgccatcagcagcggcatcagcaataaacccatcagaactgcggcgaccgagagtaaactgaacatccccgaccagccgtagcgttcaatgaccagcgacagaggccagcccgccagcgctgcccccagataggcgaacaggccgagaaatccgctgatggaaccggccgccgctttgtgtccgcactccaccgccgcgaggccaatcagcatttgcgggccaaaaacgaagaagcccaccgtaaagaaacaaaccgccagcagcgcgtagtggtgtaccggcgccagccagagcgcggcgacggagaccatcagccccagcgtgaacagtaaaatcatcggcgcccgctggccgctgaacagcagatccgagccccatccggcgaacagcgcgccgagcaggccgcccgcttcaaacagcatcaccgtggcgttggcgctgagcagattgacgccgtggctctccgtcagccagatgttgccccagtcgttgagcgcgatgcggatcaggtagaccagcacataagagacgcccagcagccagatcatcgggttcttcagcatcgtggtacgcagcatctgccacagccccatcggcgggctttgccgctcctggcgcagctccagcgggtcgttacgccaggcgcccaccgacggcaatccctcttcgcggggcgttcctttcaggtgcagcgttaaccagatgcctgatgccatgctgatcatccccggcgccagcatcgccgcctgccagccccaccagtgggcggcaaaggcgctaatcagcgggataatcgccccgccgatgttgatcgacatattccagcagccccaccagaagccgcgttcgttgcgcgagtaccagtgggttagcaggcgggcgcagggaggccagccccagccctgaaaaaatccgttcagcgtccagaccgccagcagcagcgtcagcgactcgccgaaggcgaacaccacgttcagcagaccggtggcgaacaggcccgcgcccataaaccagcgctgcccgtggctgtcgtgccacagcccggcggtaaacttcgacaggccgtaggtcaggtaaaatagcgaccccagcaggccaatatcgcctttatccaggcccagatccgtttgcagcgctggcagaacgtagttgacgcttttgcgcgtcaggtaaaacgccgcatacccgatgaccatgtacatcagcagctgcggacgcagcgtcctgtaacgttgattaatgtcggttgctgagcgcatagccgtctccgttttgctgactatatgaaagtgaaatcgaaaggggatgagagaaagtccggagtgactaagactttttcctggttagctggctgtttgttgcaaatttgtgggcaagttaacaattacgcgtgtgccgcgctgcgactccagagtcagctctccgcccagggcgctgacccgctcacgcatgccctgaatgccgaagccggccattttgtcggggctgatgccgataccgttgtccttcacctccaggcgcagcagcgtcccctgctgatacagggcaatggcaacctcgctggcgtcggcgtgtttacagacgttgttaagcagctcctgcagcagccgatagagggtaaaacgtaccgtttcgctctccggcgtggcggtgagccggtagtcaaagcggcagcggataccgcgctcggcaaaggcaaactcattgagcaaatggtgcagcgcctctttaaacgacagctcatcgagggccggcgggcgtagctggcgcagcagctggcgggtggagtggtgaatacgccgggcgagatcgttaatctggctggcggcggcctgggtttgcgccggatcgcgcgcccgcttcaccagctgcgactggatctgaatggcggtaatattctggccgatttcgtcgtgcagctcgcgcgccaggcttttgcgcgtatcctcttcggtatggatcagcttttcggccagcgcccgccgggccgccagctccgcctccagccgctggcggtagtggtgcaggttttgcgccaggtgctgctggcggctgatggcaatgcccagcccgatgccgagcagcgcctgggtcgccagaaaaatctccagctccaccagattgctgaatccaacgccaacctggcgggcgatggtgatcatcatgctgcccagcaggccggaaaggacgccgccctgccagccgaacttccacgccatcaccacgttgggcagaaacaccacaattaacagcaggcgctcgatttccggcgacagtaccatctgggtgccgatgccgatgataaagaacaggctgcaccagatgatcagcgaggtgcgcagcggtggattattggtatccagccccagcagatggtagcggtgctgctggcgcaggaattcaaaaatcagatagacaaacggcgtcagcagcaccccgccggtaaacgaggccaggccgagcatcatcgccgggcttttcacaaacggcgagagcagcgcggtgttgagcagcgcgctggcggtgaccgtagccagcagcagcgtcagccgctgccagtaaaggggaaagcggtgccagaactgttgggcgatgccggcgggaagcaggccgatcaacggcgcggccagcagaatatagccgttcagcagctgttcgccgtgcagccagagcagcatcagcaccggaggcagcaccagcgcgggccagtagcggcgcgaaagcaggatcagcagcgccagatagacgccgtgcggcaggaacagcgccgcctgctggccgttatgggtcaggtaaaacccgagcgtccacagcatcagccagccgcttccccaggccagcacgatgaacagcgagatgacgctgtggcgaaggctgcgcgacattaatgacccgccagcagctggtggtcgagggcgaaatggaccagatcaatggtgctgtgacactgtagtttgcccagcacgttggcgcgatggacgtgaaccgttttgtggctgagttcgagcttaaaggcgatctccttgacgctgtcgcctttaaccagcaaatcaaagacttcgcgttcacgcggggtgagcacttccagcacctgcgccggttgttctccgccgcgcagcgcccgcagcgcatcggcgcacaggtagtgtccgcccataccgacggaacgcaccgcctggaccaactcttccgggccgcagcgtttggtcagatagccgctggcgccggcatcaagcgcgctctgcacgaaggtgggggtgtcgtaaatactgagaataatggcgcggaactgcggcttttgcgcgcgcaggcgctttagcaggctcaggccgttctcatccggcatggcgatatccatgaccgccacgtcgacgtcgtcgcgcagcagcgccggccaggcttccgccgcgcggctgaactggccaaccacctcgagatcttcttcgaggctgagtaactgcgcaaagcctgaacgcaccaccacatggtcatcgaccagcaccactcgaatcatgtttcttctctctcagcgcatcatggttctatgatgcctgccgccgctgcgctggcaatcaatcaggcgcagttatgcaacgaatgtaacaaaatcgcaatacacttcatccttcaagctgcctctttgttggcttcgtttgcccgccccggtcactgacttatgtcagctcccggggacgaacaaccttgccgcctcgatgcagcatgaatgattttgtgtataagcattgccgctttttttctaaaaacgctttgttcttagcaagatgttttaattcctttatcaaattcaggcgcaacgaaatactgcccccataacaagacaggggagcagacaacatggttttttcatcgggtatcacactcattgccgcgctggcgctggcggcgttccaggcccaggcggtcaacgttaccgtggcgtatcagacctccgccgagccggcgaaagtcgcccaggcggacaacaccttcgccaaagcgagcggggcgaccgtcgactggcgcaagtttgacagcggcgcgagcatcgtgcgggcgctggcttccggcgacgtgcagatcggcaacctcggctccagcccgctggcggtcgccgccacccagcaggtgccgattgaagtctttctgctggcctcaaagctcggtaactccgaagcgctggtagtgaagaagagcatcaccaaaccgcaggacctgatcggcaaacgcatcgccgtgccatttatctccaccacccactacagcctgctgtcggcgctgaagcactgggggattaaaccggggcaggtgcagatcctcaacctgcagccgccggcgattattgccgcctggcagcgtggcgacattgacggcgcctacgtctgggcgccggcggttaacgcgctggaaaaagacggcacggttctcaccgactcgtcgcaggtgggcgagtggggcgcgccgacgctggacgtgtgggtggtacgcaaagactttgccgaaaagcatcctgacatcgtcaaagccttcgccaaaagcgccattgacgcgcagcagccctatatcgccaacccggatgagtggctgaagcagccggagaacatcagcaagctggcgcgcttaagcggcgtaccggaagccgacgtcccggggctggtgaaaggcaatacctacctgaccgccgcccagcaggcgcaggagctgaacgggccggtgaataaagccatcatcgacaccgctaaattccttaaagagcagggcaaagtgcccgccgccggtagcgactacagccagtacgtcaccgaccgttttgtgaagtaaaggaggtcatgatgctgcaaatctcgcatctttccgccgattacggcggtaaaccggcgctggcggatatcaacctgacgctggacagcggcgaactgctggtggtcctggggccctccggctgcggtaaaaccacgctgctgaacctgattgccggattcgtgccttatcagcacggcagcatcacccttgaaggccagcgggttgaagggccgggcgccgatcgcggcgtggtgtttcagcacgaagggctgctgccgtggcgcaacgtgcaggataacgtcgcgctcgggctgcagctggccggggtcgacaaaacgcagcgccgggcaaccgccgcgcagatgctaaaaaaagtgggcctcgaaggggcggaaaagcgctttatctggcagctctccggcggccagcgtcagcgggtaggcattgcccgcgcgctggcggccaacccgcagctgctgctgcttgatgaaccgtttggcgcgctggatgcctttacccgcgagcagatgcaaaccctgttgctcagcctgtggcacgagaccggtaagaaggtgctgctgattacccacgatatcgaagaggcggtgtttatggccaccgaactggtactactctcgccggggccgggccgcgtgctcgaacggctgccgctcgattttggccgccgcttcgtcgccggtgaatcctgccgcagcattaaatcggacccgcggtttatcgaacagcgcgaatacgtcctcagccgggtatttgaacaacgggaggctttctcatgagcgtggtcatcaatgacaaaccgcgtcagcgggggctgaagtggcgctggccgctctcgcgtcagctcagcctgagcgtggcgaccctggcggtactgctggctatctggtgggccgttgccgccctgcagctgattagtccgctgtttctgccgccgccgggacaggtattgcagaaacttatcgctattgccggtccgcagggttttatggacgccaccctctggcagcacctggcggcgagcctgacgcgtatcgttatcgcgctgctggcggcggtactgctcggcgtgccggtggggatcgccatggggctgagccccacggtacgcgggatcctcgacccgctgatcgagctttatcgcccggtgcccccgctggcctatttaccgctgatggtgatctggttcggcatcggcgagacctcgaagatcctgctgatctacctggcgatattcgcaccggtggcgatgtcggcgctggcgggggttaagagcgcccagcaggtgcgcattcgcgccgcgcaatctttaggggccagccgggcgcaggtgctgtggctggtgatcctgcccggcgcgctgccggagatcctcaccggcctgcgcattgggctcggcgtgggctggtcgacgctggtggccgcggagctgattgccgccacccgcgggttaggttttatggtgcagtccgccggtgagttcctcgccaccgacgtggtgctggccgggatcgcggtgattgccatcatcgcctttttactggaactggggctgcgcgcgctgcagcgtcgcctgacgccctggcatggagaagtacaatgagcgaacgtttaagcattaccccgctggggccgtatattggcgcgcaggtatccggggtcgacatcacccgcccgctgagcgacaaccagtttgagcagctgtatcacgcggtgctgcgtcaccaggtggtgttcctgcgcgagcaaaacatcactcccgagcagcagcgggatctcgccctgcgctttggcgacctgcatgttcatccggtctatccgcacgcgcccggcgtggatgagattatcgtgctcgatacccacgacgataacccgccggataacgacaactggcacaccgatgtcacctttatagagacgccgcccgccggggcgatcctcgcggcaaaagagctgccgtcaaccggcggcgacaccctgtggaccagcggcattgcggcctatgaggcgctctccgcgcctttgcgccagctgttaagcggcctgcgcgcggagcatgattttcgcaaatcgtttcaggagtacaaataccgcaaaagcgaagaggagcatcagcgctggctggaggcggtcgcgaaaaatccgccgctgctgcatccggtggtgcgcacccatccggtgaccgggaagcaggcgctgtttgtcaatgagggctttaccacccgcatcgttgacgtcacggagaaagagagcgaggcgctgctcggcttcctgtttgctcacgttactaaaccggacttccaggtgcgctggcgctggcagccgaacgacgtggccatttgggataaccgcgtcacccagcactacgccaacgccgattacctgccgcagcggcgcattatgcaccgggcgacgattctcggggataaaccctattatcgggcggggtaatgcttgtagcccggccgcgcgccgtggagaacatcgggaagcggtattgcacgctgcttcccggaggcggcgcttaacgcgccttgtacgggctaccggtccgcagaaagcggtaaacccgtagcccggctaaggcgcaatgcgccgcaagccgggaaaaggcttttatgccgatttttgcgcgtccagatgtaccccaatatagcgctgatagcggttcgccttcaggtaggtcaagtccaccagcaccagaccatccacgcagttgttgaaatccgggtcgctgccgaaatcgataaactgcacgccgcccggctcgcaaacttccgagtactgcttatacagcggcgggatcgcgcagccgaggttgccgagcagggacttcagccgcgccagatcgtcgttgtaatcttctccgccaaactgcgccagcacatcgggcagcgaggccggataagggcggcgcgactccgccagcggatgcgtcgccgggaaccacagtcgatagaacgcgaccagcagatcgcgcgccgacggcggcagcccgccggaaatcgacaccgggccgaacagatagcgatagtgcggatagcgcgccagatacgcgccgatgccggaccacaggtagtccagtccgcggcggccccagtagcgcggctggataaagctgcgccccagctcaattccgtgctgcagaatatcgtccatgcgcgcgtcgtaatggaacaggctgtagctgtagacgccgttcaggccgcgcttttccagctgcatcgcggtcggcataaagcggtaagcgccgacgatttccaggtcttcttcatcccacagaatcagatgcagatagtcgtcgtcgtaaccgtcaacgtcgcgacgtttgccgctgccttcgcccaccgcgcggaaggcgatttcccgcaggcggcccagttcgcgcagcaccggcgcatcttcctggccgcggcgctgccagagataaatcactttgccatccgccgtgcgccccagcgtttccgcccggcccagttcgcgcttgagcagggcgcggtcttcgggtcgggcgatagcgctttcgcttttaaatacgccgggctgcccttttgccagcagctccaggtggcgatagcagcgttcggtcagctcgcgaacagagcgctgaggatcgaaccagcttgaccaggcaatctgttggccgaaattaaccggcaggctgccgttgcggcggcgaaacatttgctgcatcagcagcagcagcggcaggctatcggaaatcagcgtgctggcgtaaaacagcgcgctgttgcgcgcgcggatccacgccggcagcagcggggcgcggtatttcgccgccagcttaataaatccggagtgccattttttatcgcgaataccgcgccgggtgaggcgtgaaacttcacccgccgggaagaaaatcagcacgccgccgttttgcagctgctggtccatctgctgcagcgccgctttggcggttcggccgttgatattatcgaccggaataaacagcgagctcagcggttcaaggtgggtcagcatgcggttggtgaccactttgacgtcgcggcgcacgcgggacaccgcgtagagcagggccaggccgtcaagcgtaccggtggggtggttggcgataatgaccagcgggccatgttcggggatttgttcgagatcgtgcgccgggatagcgcagcggatattaagatgttcgagcacctgttcgaccgtatccagtcctttcaggtgatgatgacgcgcggcaaactgctgaaactcttcctcatgcaggagctttttcagcacctttttctgccagagcgctggctttgcctgaggccacaggtcatcgatgacattgtcgagactaaacatagcggcacctcctccgtcctgcccagacagtagaaggcgcagatgtcgctcagattacagttgagtgaagatttgggatatttccccgggttgcggctggcgccttacccgggctaccggagcagatcgtagccccggtaagcgtagcgcgaccgggggtttactggcgttcgccgcacaaaaaatcgtgaatttcgccaccccaattatcgggatataacccgcgccgtacatcccggtgaaaggctgaaaaaggccaatcacaaacctgtcgtacccaaccgtgttttacaggattaatgtaggtgtaatcgatatgccggcggtagtcatcttcatcgcggattacatgttcccagaaacgcggttgccagacattttcttgttttaatgctttgctaaagcaaccttttatgtcccgccatctggcggagaaatcgctatcgtctccgggtaatgtccagatgcaatgaagatgttcaggaaggataacccatgcatcaatgtaaaagggttttcgccgtttgatggtgaggatggcgtgacgtaaagtaccgatgtgctcggtcagaagtctgctttttcggtttcgcaaattaactgtaaaaaaccaggttccacccttcaggtaataacgacggtaggcccaccatgcagcgctcctttgcaaaagatagtgtcttaagcggcagggtagagtcggggtaacagtctggcaagaatccaaagataatggtggaaagagtctcgcaactttttgcagcagaggaattccccgggttgcggctgatgccttacccgggctaccggagcaggtttgtagccccggtaagcgtagcgcgaccggggaacggtaatagccgaattaacgcaggattttcttttcggcgagatcgagggcgaagtagctgaagatcagatccgcgccggcgcgcttgattgcgccgaggctttccagcaccactttctcttcatcgatagcgccggcctgggcggcgaacttaatcatcgcgtattcaccgctcacctggtacgcgccgagcggcaggttggtgcgctcgcgcagatcgcgcaggatatcgagatagggaccggccggtttgaccatcaggcagtcggcgccctgggcttcgtccagcagcgattcgcgaatcgcttcgcggcggttcatcgggctcatctgataggttttacgatcgcctttcagcgcggtacccgcggcttcgcggaacggaccatagaacgatgaagcgaacttggtggagtaggacataatcgccgtatcggtaaatccggcggcgtccagcgcctggcgaatggcctgcacctggccgtccatcgcggcggacggggcgataaaatccgcgcctgcggcagcggcgaccaccgcctgcttaccgaggttgctaagggttaaatcgttatcgacaccgtggtcgcacagcacgccgcagtggccgtgggaggtgtattcgcagaaacaggtgtcggacattacgatcatctccggcaccgcctctttacagatgcgggacatgcgcgctaccaggccgttttcgttccaggtatcgctgccaacggcatcggtatgatgggaaatgccgaaggtcatcaccgaacggataccggcgttggcaatgcgctcgatttcgcgcgccaggtgtctttccggaatacgcatcacgccgggcatcgcttcgatggctttgtaatcgtcgatttcttcttcaacaaagatcggcaacaccaggtcgttcaaactcagtgttgtctcttcaaacatggcacgtagcgaagcggacttgcgcagtcggcgcgggcgagtgattaaatctgtcatggtttgcctgattttgtgaaatgaaaaaagcgagtttacctcaattggcggcgggatgtttcgccaaaacgatccttatctatcgtcggcaaaacatcccaacaggttactggctggcggtctcaatcccggggcggtcgccgcttaattcgctgaccagctcgttgacgccatcgctcatgttgttgaaacgcgtcaatgaagagcgggtgaccaccacaaaggcgccgacgttagcctgcgggttcatcgccatgtaggtgataaaaccgccgccgccgccggtcttctgaataatgcccggctggccgtttttcggcttcatgtagacccagccgagacccagcgcatcggctttgcccggcacgtccatcccgatcaccctcgtcagctggctgcgttgataaatgagcgtctgcatccggtccgcctgctgcccgcgggtgaagaaatcggaagagaggaactgctgcatccagcgcatcatatcgccaggcgtggagtaaacgccgccgctgccgatggccgccagcgtattgttgcacgggctggcccctttctccgggatcatcaggcgccggcactgatcgggcgaaggcgtaaaggtggtgtctttcatccccagcggacgggtaatctgctcttcaaacagctgcggccagggcttgcccgcggcggtagagagcgcatcggccagtaaatcgaacgccagattggaataggaggcctgcgaacccggagcggcttttaacgttgccgtggagagccagttccagcgctgctggcgcgtcggccagacgaacaccggacgatgcgccgcgccgccgggctgctcgcgcggcagggcgctggtatgggtcgccagattcaccagcgtaatgggcgctccctgatatgtcggcacgcgcgcgcccggcggggcgtatttgctcagcggatcgttgagcttcaccacgccctggtcgagaagtttgaccagcatttcgctggtcatcagcttgctcagggaggcgatgcgaatcaccgaatcgagctgcgggtgctcattattgcccgggcgcgtctcgccgaagctgcggaatacgcgctggttaccatcgataaccaccagcgccatgccgatcgcgccgctgccgtagtagatatggttagcgtaacggtcgacaacatccgcagcgaattccgggtcgacgctcggctgcgcggcctgggccgatgtcaacgacgccgcgcacagcgcagcaaaaatgagcagactacgtttcaacgggggcatccatcatggtgaagaaaaatatagagcgtatttatactacgaagcgccgccgagcaaagcgctaataacgccattctgtgcggaaaaacgtaacctggcgtaaaaaatcctttttttgctttcggatagcggctttcgcctgcgggcgcgtatgatattcgttttggctaaacatgggtggcaagagacgatggcggcgaaacgggtagtgatggtagtggatatgcaaaacggcgttttcgcgacgccgcgtattgagcgcgagcgctgcgcggcgcaaattaaccgcctgataaacgtcgcggataccgttatcttcattcagcactgcgaagagggcggtctggaagaggggagcgaaggttttgctttgctgcctgaactgcaccagccggcaggcgcgttgttcgtcaccaagaccgcctgcgacgccttttaccgcacccgcctggaagaggtgctgcgcgaacatcacatcacgcagtttgtgatttgcggctgcgccaccgactactgcgtagataccaccatcaaaaacggcgccagccggggctatgcgattaccgtcgctgaagatgcccataccacagccaaccgcccggcggcgcaggccgtcacgctgatcgcccactacaacgaggtgtggcgtacgctgaccgttccgggcaatcctttacaggtgacatcgacagaaacaattctgaacggatggtcggcgaactaagctgctgatatccggtctcatcatccgcccactttgcttcgctgcgacggctttgcggcgggcgtctttgtggtacacagcacagcaaaacgaaaaagaagttagcaggagagcatgatgtttaaatcctttttccccaaaccggggccgttttttatttctgcctttatgtggtcgctgctggcggtgatcttttggcaggcgggcggcggcgactggctgctgcgggtcaccggcgcatctcaggatgtggcgattagcgcggcgcgcttttggtcgctcaattacctggtgttctacgcgttctacgtattctgcgtgggcgttttcgccctcttttggtttatttacagcccccaccgctggcagtactggtcgatcctcggcacctcgctgattattttcgtcacctggtttctggtcgaggtcggggtggcgatcaacgcttggtacgccccgttctacgatcttattcaggccgcgctggcgacgccgcataaggtcagcattaaccagttttatcaggagattggcatctttctcggcatcgcgcttatcgcggtggtcatcggggtgatgaacaacttcttcgtcagccactacgttttccgctggcgtaccgccatgaacgaacactatatggcgcactggcagcatctgcgccatatcgaaggcgcggcgcagcgtgtgcaggaagataccatgcgctttgcttccaccctggagagcatgggcgtcagcttccttaacgcggtgatgacccttatcgccttcctgccggtgctggtgacgctctccgcgcacgtcccggatttaccgattgtcggccacctgccctacggcctggtgattgccgccattgtctggtcgttaatgggtaccggcctgctggcggtggtggggatcaagctgcccggcctggagttcaaaaaccagcgcgttgaggcagcctatcgtaaagagctggtgtacggcgaagatgacgccaaccgcgcgacgccgccgacggtgcgtgagctgtttggcgccgtgcgccgcaactatttccgcctctatttccactacatgtatttcaatatcgcccgtattctgtatctgcaggtggataacgttttcggtttgttcctgctgtttccgtcgattgttgccggtacgattacgctgggcctgatgacccagatcaccaacgtctttggccaggtccgcggttcgttccagtatctgattagctcatggactacactggttgagctgatgtctatctacaaacgtctgcgcagcttcgagcgcgagctggatggcaaagagctgcagaccgtgacgcaaacattaagttgatcaacgcaaggatgaaccatgccgggagcgcaatccagaatcacttctctcaccctgacgctactggcagggattgtcctcaccgcctgctccagcaagccggagccggagctgaaaaagggcgaaaaggcgattgatgttgccgcggtggtgcggcagaaaatgcccgccagcgtgaaagatcgcgaggcctgggcgcaggccatcgccaaaacctttgccagccagaagctggcgccgacggaagagaacgtctgttcggtgctggcggtggcgcagcaggagtccaactatcaggccgacccggcggtgccggggctgaataaaatcgcctggcaggagattgaccgccgggcggagaaaatgcatatcccggtttttctggtgcataccgcgctgaaaatcaaatcgcccaacggcaaaagctatagcgaacgcctcgatagcgtgaaaaccgaaaagcagctgagcgcgattttcgatgattttatcggcatggtgccgatggggcagaagctgttcggctcgctgaacccggtgcataccggcggcccgatgcaggtcagcatcgccttcgccgagcagcataccgacggctacccgtggaaaatcgacggtaccgtacgccaggaggtgttcagcctgcgcggcggtctgtggttcggcacctatcatctgttgaactatccggcgaactacagcgtaccgctgtaccgttttgccgatttcaacgccggatggtacgccagccgcaacgccgccttccagaacgccgtcgcaaaagcgacgggcgtgaagctggcgctggatggcgatttgattcgttacgatagcgacgaggccggaaccaccgaactggcggtgcgccggttatcctcacagctggcaatgagcgatgatgatatccatcgtcagttaaagaagggcgataccctggcgtttgaagagagcgatctctataagcaggtgtttcgcattgccgataagaaagccggcaaaacgctcccgcgggaggtgctgccgggcattcagcttgagagcccgaaaatcacccgtaacctgacgaccgcctggtttgccaaacgcgttgacgaccggcgggccagctgtatggcgcgccgttagcggcggctgcgccagcggaatatcagcccaggaataccaatgagcacgcagcccgccaggaagggaatcaggccgaacagggtaccgaccaccaggctaatctcgacccgcgggcggctgctgtcctgcatttgaatcagatgctcaaaaacgccgggcgcgtggatcagcatactcagcatttgcgcaccggcccagaagcaaaacagcacaaacagagcgtaagcgatgttgctgccggtgagagagcccctctttttgccgccgttgacggtctttgcaaaggtgaactctgccatcttgacctccgtacttcactttcttgccgttttttccacggcgacgtagagggtaattctggcaacgaaggggggatttcagtatcagattgctggtaatttccgcccaggaatattcctgatttcatcgggttgtgagtttgctacaaatttgtgaaatttagaccgatatcgcaatgtgcgacaattctcaacgccgctacagacccgcggtggcggctatgcgaagatgctttttttgttgtcggagtggttatgaaactcacggaaaaaatccgccgcgattggcactactacgcggtagcgctggggttaatttttattatgaatggcgtggtcgggctgctcgggtatgaaaccgaaggctggcgttcttacgcggttgggctggtgacgtgggtcattagcttctggattgccgggtttattattcgccgccgcccggcagaggaagcgtgaaccggaggtggtgaacccgtagcccggctaagcgcagcgcgagccgggaagatgccgggctgatacatcaaccccggcgcactccccgggtcgcggcgtaaacgcttactcgggctaccgccggcagacggcggtgaacccgttaccgggcttaattcatcgatgttttcagcgcccgatcggcggcgtgacgctcaagcgccagctcaatcaggcggctaatcaggctggtatagtccagaccgctggcctgccatagcttcggatacatgctgatgttggtgaagcccggcagcgtattgatttcgttaatcaccacgtcgttatcggcggtcaggaacacatcgacccgcgccatcccgctgcagccgagggtctgataggcgcgaacggcgatatcgcgaattttatcgtttacatcgctgtcgatggccgccggaaccaccaccttcgcgccctgatcgtcaatgtacttggtgtcataggcgtagaattcgctgttgaggacgatttcaccgcaggtgctggcctgaggattatcgttgcccaataccgcgcactcgatctcacgccctttaatcccctgttcaaccaccactttatggtcaaattcgaaggccagggccacggcctgctgatactgctcttcgctgttgaccttgctgacgcccaccgaggagccctggttcgccggtttgacgaacagcggcaggcccagcttcgcctgcacctcggcaaagctcacctgatgacggttggcgcgggtcagggtaataaaaggcgcaatcgacagcccggcatcgcgcagcagacgcttggtcacgtctttgtccatgcaggcggcggagccgaggacgtcggagccgacgaagggcaggttagccatccgcagcataccctgcagagaaccatcttccccaagggtgccgtgaacaatcgggaaaatgacgtcgatggccgccagcggctggccgctatcagcgttaatcagctgctgcgcttcgcgtccgggaatttgcgccagggtaatatcggatgggcgcagggcaatatgggcggggtcctgcggattgagcagatagttgctggcgtcgttgatatgccactgcccctgcttatcaatccccagcaaaacgacgtcgaagcgcgttttgtcgatggcttccacgatatttttcgctgactgtagcgatacttcatgttctgccgacttaccgccgaaaacgatcccaaccctcatcttagccatttcaacttccatcatgattacatcaaagggcataacatagcatgtgaaacggccgcctggctgccataatattcaccgggtaaagcattgggaggcagcgcgtgaaaggaaaagggcttatcgttctgttggcgctgctggcggccggatattacggctatcgttatcttcccgcgcactataacccgctggcgccgctgcgtctggaggatccgccggggttcatcacccactataagctgcggcgattgacgcccggacagtgcgccaacctgctgaaggaagcgaatcagcgaaatctcatcaccagccgggcggtggccgatagcgggggagagtgccccctgcaaaacgtggttcgggtacgcgattttggcgcggtaaagctcagcagcagcttcctcgccagctgcccgctggcgttaagcagcgcgctgtatctgcaacagcaggcgaaaccgctgactcggcggatgctggggcaagagctccgccaggtcgaccattttggcagctatgcctgccgtaatatttaccatcgtcagaacgcgcggcgcagcgagcacgctaccgcggaggcgctggatatcagcggctttcgtttggccgatggccgacgcatcagcgtgctgaaagggtggcccgatgcgcagtatcacccctggctgcaggcgttactggccggcggttgcagctattacggcaacgctttagggccggactataacgcggcccatgcgaaccattttcacctcggtatgcgcggccaggggttctgtttctgagcataactcgctgtataccacgcttttcaccacgaaattattcgcaacagggcaatctggtgtcataaaacactaaactcgccgtcagcgcatctctggtagtacgtcggacaggggaaattgctaagctagttaataattgccaaaaaattaatgaatacgcgtagttatggaatcctggaaggttaatcttatctccgtctggtttggctgtttttttaccggcctggccatcagccaaattcttccctttttgccgctgtacgtttcccaactgggcgtgacctcgcatgaagcgttatccatgtggtcgggcctgacgtttagcgtcacttttctggtgtcggcgattgtctcgccgatgtgggggagcctcgccgaccgcaaagggcgcaagctgatgctgctgcgcgcctcgctggggatggccatcgccattttacttcaggcgttcgccaccaacgtctggcagctgtttatcctgcgcgcggtgatgggactgacttccggctatattcccaacgccatggcgctggtggcgtctcaggttccgcgcgagcgtagcggctgggcgctgagcacgctgtcgacggcgcagatcagcggcgtgattggcgggccgctgctcggcggtttcctggccgaccacgtcggtttgcgcgccgtatttatcatcaccgcgattttgctgaccgtaagcttcctggtgacgctgtttctgattaaagagggcgcccgaccgcaggtcacgagggcggagcggctgagcggcaaggcggtatttgcctcgctgccctatccgggactggtgatcagcctgtttttcaccactctggtgatccaactttgcaacggctcaatcggcccgattctggcgctgtttatcaagtcgatggcgccggatagcaataacatcgcctttctcgccggcatgatcgccgccgtgccgggcgtgtcggcgctgatttcggctccccgtctggggaaattgggcgacaggatcggcacctcgcggatcctgctggcgacgctgtgctgcgcggtggtgatgttctttgccatgtcgttcgttacgaccccattccagcttggtgtgctgcgtttcctgctcggttttgccgatggggcgatgctgccggcggtgcaaacccttctgctcaaatactgcagcgacagcgtcaccgggcgtattttcggctataaccagtcgtttatgtatcttggcaacgtggccgggccgttgatcggcgcgtcggtctcggccatggccggcttccgctgggtgtttatcgccacggcggttattgtcctgatcaatatctggcagctggccatcatgctgcgccgcagccgccgtcctgcggcttaattccgctctttctcctcggccgcgatggatgcgacagcgtcagtagcggcctcggtgttccttaagctttaaatgtatcaccgatcacaaaacgattattttcccctctcatcctcttctattcctgactgttacgcgtatacagttacgcgtaacagttattgaaaaagaggttttatgcgaaatttatttgatttgtcagggaagcgcgcgctgatcaccggctccgctcaggggattggccatctgctggccggcggcctggcggagtacggcgcggagatcatcatcaacgaccgcacccaggcgcgcgcggaccaggcggcgcaggcgctggtggcgcagggctttcatgcggtaggggtcgcctttgatgtcacccgggcggcgcaggtcgagcaggcgatagcccgcatcgaagaggagatcggcgccattgatattttaattaataacgccgggatccagcggcgtttcccttttaccgaatttccggaggaggagtgggataacgttattgaggtcaatcagaagggcgttttcctggtttctcagcaggtggcgaaatatatgatgggccgccgcgcggggaaaataattaatatttgctcaatgcagagcgagctggggcgtaaaaccattacgccttacgcggcctcgaaaggggcggttaaaatgctgacccgcggcatgtgcgttgagctggccgaatataatattcaggttaacggtatcgcgccgggatattttgccaccgacatgacggccgccctggtcaacgatgaggcgttttccgcctggctgtaccagcgtaccccggcggcgcgctggggaaaaccggaagaactgattggtgccgcggtatatctggcctcgtcggcggcaaactttgttaacggtcatttgctgtttgtggacggcggaatgcttgccgctgtctgaatcacttcgcgtccttcgggcagcagcgtgcccgcactacctgaaggacagagtattaaacccgtgtgatgatattgatatctgaggagtgcttatgcacatgctcgcgaaattacccgcgcgtcgctggtggtatttaatgccgattatatttattacctatagtctggcctaccttgaccgtgcgaattatggttttgccgctgctgcgggaattgaaagcgatttgggtattaccaaaggaacggcatcgcttattggcgcgctattttttctcggctatttctttttccaggtacccggcgcgatatatgcggtaaaacgcagcgtgcgaaaaatgattttctttagcctgattttatggggattctgcgcggcggcgaccgggttcgtcagcaatattccgatgctgatggcgattcgctttacccttggcgtggttgaggcggcggtgatgccggcgatgctgatttatatcagcaactggtttacgaaaaccgagcgttcgcgcgccaacacgttcctgatcctcggaaacccggtgacggtgctgtggatgtccatcgtttccggctacctgattcaggcgtggggctggcgcgaaatgtttatcatcgaaggcattccggcggtactgtgggcggtatgctggtggatactggtgcgcgataaaccgtccgaggtttcctggctgaacgagcaggaaaaagagaccctgcagaaggtgatggacagcgagcagagtcatatcaagccggtgcgcaactacggtgaagcgctgcgctcgcgcaatgtgatcatgctctgcgccgtgcacgcgctgtggagcatcggcgtgtacggcttcatgatgtggatgccgtcgattctgaaaaatgccgcgcagatggatatcgtggcggtgggctggctggcggcggtgccgtacctggcggcaattatcctgatgctgacggtctcctggctgtcggataagttccagaatcgtaaactgtttatttggccgttattgctgattgccgctatcgctttctttggctcctggctggtgggcaaccaggcgttctggctctcctatgcgctactggtcattgccgcggcctgcatgtatgcgccgtatgggccgttcttcgcgcttattcctgaactgctgccgcgcaacgtttccggcgtatcgatgggcttaatcaacagctttggcgcgctcggcgctttccttggtgcgtggctggtggggtacctcaacgggattaccggcgggccgggagtttcctatacctttatggctgtcgcgctgctgtcctccgtcgtgctgatgtacaacgtgcgcgctaacccgcaacccgtttccccggtgacggcaaaaaaggttgccggctaacataaaccgccgctgctgtggtaaggttctctgtgagcataaaagtcgcttgtcgtagagaacctgatgaaaaacaaccggatgacattgcaggatatcgccaacctggcggggctgaataaaatgacggtcagccgttatttacgtgaccccggccaggtttctgagcgcagccgtgagctgatctcaaaggtcatggaagagaacaactatatccctaaccgcgccccggaaatcctgcttaacgcccggagtaaaacgattggcgtgcttattccctccttccgcaaccagatttttgccgatgtgctggccggcattgagtcggtgacctccgcgcaccagtatcagaccctgattgccaactacgaatatgacccgcagcgcgaagagcgcgaagtgctcaatctgctctcttataatatcgatgggctgattttgaccgggaagcagcacagcgatcgcatggtgcagtacgtgcgcgccagcggtatccccgtcgctgaactgatggactacggcggccagcagctggatatccaggtggggttcgataacgaaaaggcggcgtgggatatgactcatgcttttcttgagagcggcaaacgggcgatcgccttttttggttcaatggacgatccccgcgatttaagccgcttccgcggcaccgagctggcgctggcggagcacggcctgaaggcgtatcacatggcgccgcggaccatctcctcggttgcgcttggccggcagatgttcctgcagatgcagaagacgcgcccggatattgacgccattttttgtaccaacgacgatctggcggtgggggtgctgctcgagtgccaggcgcaggggaaagccgttccgcaggagatcgccatcgccggttttcacgggctggaaattggccgtgcgcggctgcaaaaaatagccagcgtcattaccccacgttatgaaatcggtaaaacggcgagcgaaatacttattgcgcgcctgaccggtaaagacgcgccggacagcgtgaatctggcctaccagatatattatggcgatacgttatagttatcgatagaatagcgatattccattttattcttatttgttaaagttggttatgatgcttattaatccgcattgagtaaattcctggcgggtggcatgcaaagagcaaaacgtttcgcttgttattcaccggcgtggcgaacttttttaaaaaataatagtggcaaccgacggctaatgtatgacataaatagcagactacggacctcgcataaggataaagtgctgtgaagaatctcattgctgagctactggtaaaactcgcccaaaaggaagaagaatcgaaggagctgacggcccaggttgaggcgctggaagtggtggtgaccgctctgctacgtcatatggagcaggacgcccagcaggcgctcatcatcgatattgagcaggccatcgatgaggccagccccggcccgctggtggatgaccgcgatacccagctactgcagcaatatataaagaagctgttacggcatcctcgtagctagttttgtgacagggtatggatgctgtcattttactgtcacatcgcttttatacagtctccctcgttttgttttttaaagtattttttacacggagacgataaaagtgaaattaagcgccctgtttattgccctgctgcctctgctgggctccccgattattcacgcagaaacaacaaccgcaccggttctggaaaatcgtgccgcgcagggcgatatcaccacgccgggcggcgcgcgtcgtttaagcggtgaccagaccgaggcgctgcgcgcttcgttaatcaataaaccggctaaaaatattattttgctgattggcgacggaatgggcgattctgaaatcaccgccgcgcgaaattatgcagaaggggcgggcggcttctttaaaggcattgacgcgctgccgctgaccggccagtacacccattattctctggataagaaaaccggcaagccggattatgtcaccgactccgccgcttccgcaacggcctggaccaccggcgtgaaaagctataacggcgcgctgggcgtggatatccatgaaaaagatcatcagaccatccttgagctggcgaaagcggcgggcttagctaccggtaacgtctccacggcggaactgcaggacgccactcccgctgcgctggtggcgcatgtgacgtcgcgtaaatgctacggcccgagcgtgaccagcgaaaaatgcgccagcaacgcgctggaaaagggcggtaaaggttcgattaccgaacagctgctgaacgcccgtcccgacgtaacactgggcggcggtgcgaaaaccttcgcggaaagcgcgacggccggtgaatggcagggcaaaacgctgcacgatcaggcggtagcccgcggctaccagatcgtcaccgacgccagctcgctggccgccattagccaggccaatcaggacaaaccgctgctcggtctcttcgcggaaggcaatatgccggtgcgttgggaaggcccaaaggcgtcttatcacggcaatatcgataaggcggcggtgacctgtacgccgaacccgaaacgcgatgcatcggtgccgacgctggcgcagatgaccgaaaaagccatcgatctgctgagcagcaatgagaaggggttcttcctgcaggtggaaggcgcttctatcgataaacaggatcacgcggcgaatccgtgcggtcagattggcgagaccgtcgatctggacgaagcggtacagaaggcgctggaatttgccaaaaaagagggcaataccctggttatcgtcaccgccgaccacgctcacgccagccagattatcccggcagataccaaagcgccgggcctgacgcaggcgctgaacaccaaagatggttcggtgatggtgatgagctacggcaactctgaagaagagtcgatggaacataccggcacccagctgcgtattgccgcctacggcccgcacgcggccaacgtggtgggtttaaccgaccagacggacctgttctacaccatgaaagccgcacttaatctgaaataaccgggcgccggtgatgaattttcgttaccggctggttttttctccatcagcgaccagacttacagagatccactcatagaggatggtgcgatgaaaataacattacttgtgaccttactttttggcctggtatttatgacagcggtgagtgccgcggaaaaagagttgacccctcagcagcaaaagatgagcgtctgcaataaagaagcgtcatcgaagtcgctgaaaggggatgagcgtaaaacgtttatgagtagctgcctgaagaaagatggcgccgcgcaggacggtaaggggctaacgcctcagcagcagaaaatgcgcgagtgtaacgctcaggcgacccagcagtccctgaaaggggacgatcgcagcaaatttatgagcgcctgcctgaaaaaacaggtgtaagaaatgggcgggtgagggaaacctcacccgctattcgctattgcaatcaggaacggctcagcttctctgatttctccatgcatttcaccatcgcttcgatgacggcggaacggaagcctttctcttccagcacgcgcacggcttcgatggtggtgccgccgggcgaacacaccatatccttcagcgtccccggatgctcgccgctttcgagtaccattttggccgagcccatcaccgcctgcgccgcgaatttataagcctgcgcgcggggcattccgccaagcacagcggcgtcggccatcgcttcgataaacataaagacgtaagccggcgcggagccgctgacgccgaccaccggatgaatcatcggctcagcaatgatttccgcctgaccaaagcagcggaatatggtcaggatctccgcggtttcttcggcgctgaccagcgcattcggcgtgaccgacgtcatccccgcgttgaccagcgaaggcgtgttgggcatcgcgcggactattttgcggtcatggcctaaggcgcgcgccagctggtcgagcgtcacgcccgcggcgatagaaaccaccagagagtctttattcaggctggaggcgacgtcgctgagcacttttaccatcacgcccggctttacggcgccaaaaacgatatccgccacctgagccacttcctgcgcgctttgcgccgcattaatgccgtattggtcgtgcagggccgccactttatccggcgacggggtatagacccagatttgacccggctgcacctgcccgctggcgatcaggccgcccaggatggccttgcccatgttgccgcagccgataaagccgattttcttctccatcaccaatcccctttgtttgttttatcgttagcgatatagcttaacatcttgttgctttcgcggaaggcaaaagcaggcgacaatacggcatctctttttcatcgacaggagccgcaatggctatttgggttgatgcggacgcgtgtccgaacgtcattaaagatattttgttccgcgccgccgagcgcgcgcaaatctcgctgacgctggttgctaaccagcctctgcgcgtcccgccgtcgcgctttatccgcacgctgcgcgtggcgcaggggtttgacgtggcggataacgaaatcgtacgtttatgcgagccgggagatctggtgattaccgccgatatcccgctggcggcggaagtgctggagaaaggcggggcggcgctgaatccacgcggtgaacgctacagcgaggcgaccattcgcgaacgcctgacgatgcgcgactttatggaaacgatgcgggccagcggcgtgcagaccggcggcccggatagcttatcccagcgcgatcggcagcagtttgccgccgcgctggagaaatggctgttagacgttaagcgccagcagggttaaacccagctgtcgtcgtcgctgccgaaatcatcattgccgaaaccggcgtcaaagtcggcgtcataatcgttgttgtcggcgaggaactgcccgtcatcctggcggaaggtatcgtcagcgacgctattgtcctgcgcctggctgagatccggctgcggtttctcttcgatgatattgacgatctcttgcggatgcgagccgctaaacatattggtcaacatgtttcccagcaccacgccgcccgcgacgcctgccgccgtttgcagcgcgccggccataaaaccgccgccgctgcgcgacgcctgaggggcgtagttctgctgctgcgcctgcggagcatactgaggctgggcgccggcctgcggtcggccatactgctcggcgccaggaatcgggtcggaaccgcgcgactgaccgccgccaaacaggcctgagagaaacccgccgctgctcggcttcgcggcctgaagctgggtcacctggctctccagcgcctgaatgcggtcgttgagctgtttgatcgccgcttcctgaatcagaatcgtttgcgccatatagtaaggggcgaacggctgctctttaatgtgcccggcaatccgctcctcagcgctggcatcccgtgatgcgctgtggctctcggcctcttttaatcgggaaaacagtccatcgataaggcgttgctcttcagattgcatactacatacctctgtcatactgattgattagcttcagattcgctccgaagcacgcatcttgtaaatatgcggcagcgtaaagctgtgcagaaatgtgttactgtttacgccagactgcgaacaaaaaataacttctgtacaaaagtaaagctggcataacaccaaatgcaatgataagtttacattaaatgtcctttctaatactaaggtgaaagggtttgcagatggtgtgtaacgtttattttacgatttgcgtcgggtaagtttgcggtaccattgtttctcttttcgctttcatttatccgcaaaatgcggaaccaaggggtcttcggtaatgacacagctaatatttcttgtcgggcctcgcggctgcggtaaaacgaccatcggacacgcgctggcgaaagctcgcagctttaagttcgccgacacggaccatgagctgcaggagcatgagcagcgcacggtagcggctatcgtccagcaggaaggctgggaacgctttcgtgcgctggaaacgcaggctttagaacgcgtcgctcaacccgcgacgatcatcgccaccggcggcggcattatcctcagcgaatacaaccgacagtttatgcgggaaaatggcatcgttatctatctcgaggcctcggtttccgcgctgattgaccgccttgaagcctatccgaaggcggaacagcgcccgacgctgaccggaaagcccatccgcgatgaagtgggtgaggtgctggcgcagagggaagcgctgtatcgcgcggccgcgcatcatattattaatgcgaccgccacgccggatgaggtcgtggaacagattatgaccaccgtctgcggcgagacctataccagttaagactttgcctggggtaaacggatcggcagcgcctatactttaaagctcttaaggtaaaaaaaggaaacgctatgccgaccagacctccatatccaagggaagcgcgtgttgtcgccgttgaaaagggcccgcagggccagacggtcacctggtatgaactgcgcgccgatcacccgacgccaaactcactcatcagcgaacatcctacagaacaggaagcgctggacgccaaacggcgttacgaagatcctgataagtcttaattcctcttaaatgtccgggattcgttctgaaaagatcgctaccggacatgtatcacatttttaatctattaacggtactaatgattacctaaggtacggattttcaggagcgtttttgacgcttctggaatctttacattccatatcagccgtaacctgctacgcttctcgacggttgctttgggtcaccagggggcagaagttgtaaataaaagcctgttttgaaacagcggttgtgaaaaggtaaacgatatgagtagtgcatcgatggcaatcttgaccattggggtcgtacccgtggcggagatgctgccgcttttaactgaacatatcagggaagacgagatcgcccacattagcctgctcggcaaaatgacgcgcgaagacgttatgcgggactacagcatagagcccggcgatgagatgctattgaccttgcttaacgataatcaaattgcgcaggtctcacggcagaaggttgagcgtgatttacgtagcgtcattgcgatgctcgataaacaaaattacgaccttattttactcatgagcactcatccctttagcggatttacggcgaataatgcgatcctgcttgagccgcaaagaattattccgccgctggtcgcgtcgattgtcgacggccatcaggtgggggtgattgttccggttgaagagattttgccgctgcagcggaataaatggcaggtattagaaaatactccgttttacgccatttccaatccggtgagcggcggtaaagaggagttaatcgccgcgggcagggagttgattgaacagggcgcagacgtattaatgctggattgcctttgctaccaccagcagcatcgcgacatattacaaaaggcgctggatattccggttctgttgtcaaatgtgctggtttcacggctggcggcagaactattagtttaacctgatataacgcgttaattttacgtgacaggggcaaggagcgccccctatattgtgccttcaacacaagatcataagggcgagtttatgcttcaaagcaatgaatactttgacggaaaagtaaaatctatcggcttcaccagcagcagcaccggtcgtgcgagcgtgggcgtgatggcggaaggggaatatacctttggtaccgcgcagccggaagagatgaccgtagtcagcggcgcgctgaacgtacttctgccgggagaaaccgagtggaaagtctatgccgccggggaagtattcaacgttccggggaatagcgagtttaatctgcaggtggctgagccgacctcttatctgtgccgctacctgtaatgttcgtttccttcctgcgctggcaggaaggaattcacgagattagcgctgcgcttcgccgcctagcccttccaccagattctgaatcagcgcggccagctcgccggtcatcagaataaagtccgcgtcaaaacgctgagcgaaatcttcccgatcgatatcttcattctgatcgcgcagttcgtcgcagaacttcaggcgtttaatcgaaccatcatcgcacattaagaactgaatgcgctgctgccagtcgagcgccagcttggtgacgaccttaccggcttcaatgtgcacggcgatctcgtcgctcaccagatcctgttttttcgcgcggatcacgccgccgtcttccagcatcgctttcagctcggcttcatccagcagctggaagccctgagccacggtaccggaacgcacccactcggtcagcgtcagttcgatcggggtttccagcgccagcggaacaaccggcagcgagcccagagttttacgcagcagcgccagcgtatcttccgcttttttggcgctggcgcagtccaccatgatcaacccgttgacggtatcgatccacatcatggtctggctgaagcggctgaaggcgcgcggcagcagggaatgcagcacttcatccttcagagaatctttttcggtttttttcagcttacggccctgctcggcttccagcttgaagatctttgcttccagcgcctgtttgatcaccggagacggcaggatcttctcttctttacgcgcgcagataacgatctggccatttgccgtatgcgtcagcgcatcgctgtgcgatcccatcggcggtacccaaccggttttggccatatcctggctgccgcaaggagtaaaggtcagctcggccagctgtttttccatctcctcggcgcgcagggaaatgtcgcggctgagacgataaaccattaaatttttgaaccacagcatgataatttccacggcttagtcgttaaatccagcgggcatgatagcgaattgtcgctatgcttgcattgttaatcgggagaggaattcacagtgcgcattggcattgatttaggcggaaccaaaacggaagtcatcgcgctgagcgaccagggagcgcagctatttcgtcatcgcctgcctacgccagggggcgattatcgccagacaatagagacgatagcctcgctggtcgagatggccgagcaggctaccgggcagagcggcacggtcggcatcggcatccccgggtcgatttcgccctataccggcgtggtcaaaaacgctaactcaacctggctcaacggtcagccgtttgataaagaccttagccagcgtctgcaacgggaagtgcgtctggccaacgatgccaactgcctcgcggtgtcggaagcggtagacggcgcggcggccggggcgcaaacggtatttgcggtgattatcggcaccggctgcggttcaggcgtggcgcttaacggacgcgcccatattggcggcaacggtacggcgggcgagtgggggcacaacccgctgccgtggatggatgaagatgaacttcgctatcgcgctgaagtaccgtgctactgcggcaagcagggctgtattgaaacctttatctccggtaccggctttgcgaccgattaccggcggttaagcggtcattcgctaaaaggcagcgagattatgcagcgcgtgggcgagcgggatccggtggcggagctggcgctgagccgctatgagatgcggctggcgaagtcgttggctcacgtggttaacatcctcgatccggacgttattgtgcttggcggcggaatgagcaacgttgaccgtctctaccagacggtgccgaatctgctaaaaccatgggtattcggcggtgaatgcgagacgccgattcgccgggcggcgcacggggactccagcggcgtgcgcggcgcggcctggctgtggccgctgtaatcatcaatccgctgcgcggcctgaacggcgcagcggataccccgcggattaccggtccgggatctcctccaggctgtagtaaatcgacagccccctttttttaccttcctcaatatccaggtccgctccgcgggattcacccggcatgcgcaatatagcgtcgcagcggctaatgacacggtgagcgaccgggtagagatattcttcgctaatcgcatcgccaatttccgttgaacccgcagctttggcgatgggcagagccagccattcgccgaccacggggatatggcctttctggtaaacgcgtagcgcaacctgggccatattgttcaggttagcgtcgataagttccgcgcgattgtgggtgccgctgcgtaccgggccggcaatcaaaataagtaagcttttcatggttaagaccttcttaatgggccagaggggatgggacgatgctgccggaggctgcagcacgccctcagaaaaagttatcaatgcacggttttgcacgaatcgatgtggttaaaataataatcacgatttttatgcattatttcgcctgcttatcatcgttaaagcaatgaaattaaacttatcatgcaaattcgtgcaatatcaagatttatcgtgaattctgagcccgggcaacggcgcgacctctcccgtgggggagaggcttgaagacaggtgcggagggggaaatttattcgacggcgaaagctttatcgagacggctatagcccagcccgttgatttttttaactttaatttgcacaggaatgcgctctttcatcgcctcaacgtggctgatgacgccgataatcttgccgctggcgttgagcgcgtccagcgcatccagcgcggtatccagggtttcgctgtccagagtgccgaagccctcatcgagaaacagcgagtctatccgcgttttatggctcaccagatcggagagcgccagcgccagcgcgaggctcacgaggaagctctcgccgccggacagcgtccgggtgtcgcgcaccgcgtccgcctgccaggtatcgaccacttccagctccagggcgtcgctggctttgcgttgcagcagatagcggccgtgcaggcggttgagctgatggttggccagccacaccaggttatccagcgtcagtccttgcgcaaacttacggaatttatcgccctctctggagccgataagcgcgttcagccatccccagtcttccacttcctgcgcagcgcgttccatctgctggcgtaacgactgctgacgctgctggttttctgcattctgcttcagctgctggcgaatctctccctgacgggcgctgttttcccgcagcagcgtcgtcagctgctgaagctgttcctgtacccgctcaagaggctggctgatatccgtttccgccggaggctgctggcggtggctatccagcgcctcgcgggcccgcatcgccagcgcctgattctgctgtagcgtagtttccagcgtctgcttcaggcgttcaaggcgccggcgcgtctcctcatcgagcagcgcggcgagaaacgcctgctggtcagcgaacgggctggcggccagcgccgcgctgaactgcgcttcgctctctttcaactgagcctgctgccggctctcctgctgccccagggtttgccactggctctgaagcgcgaggcagtcgtcgtgcacctggcgccagccgtccagcggcgcgggttccgccgctaagtccgtttccggcaaggactccagcagcggggtcagctgctgaagctgttcctgcagggcgatcagttcgttctgtttggtctgccagccgcgggtctcgtcttcccgctgcgccagccagcctgcggcctgctctgctgccggtaaactcagcgcaaatgcggccagttcagccgccagcgcggcgctgcgctgcgcttgttcctgctggagctgctggagctgctgctggcactcctgctgctgggcctgccaggccagacgctgctgatgctgatacagccgctgttcatgctcctgctgcgcgtttagccagccgggaatgtcatcctttggcgtcaggtcgatatttaatccggcgatcgtcgcctgccagcgtgaggtaagcgcttgctcctgctgcagaagcgatgctttctcggtggcctctttttgctgctgcttaagcagggcgtccagctcgccgcgcaccagggcgccggcctccgccagctgtttgacttcgcgctcaagcgcatcgcgccgcgcctgatttacgccgggaaccagcgcctgatactcggcgacggccggatgctgcgcggaaccgcagagcggacagggggaaccgggctgcaggcgggctcgctcggcctccaggccggcaatgcgcgcttccatttcgcacagggctttgacatcgctaaactgctgattcttctctttataggcctgacggcgctgggccagggtggtttccagccgctcctgctcctgcttactggcctgcccggcggcatgaagctgggataaacgctggctcagcggctgcagctggccatgcagggccgcgagctgctggcgcagagcgcgcgccgcggcgtgctgcgcgaggccggcgctgacctgctcagcatccagcgccagcccgtcgggcggcagttcgcccagccggcggctggtttccgccagacgctgctgcagagcggcttgctgctgcgtatcgcgggcctgctgctggaaagcggcccgccagcccgccagcgcattgccccatcgctggtagcggtcgtgctcttttagccatgcggcgagcgtttgctggtggttctgcaggcgttcagattgctgccgggcggcgaggcgaatccccgcccgcagccgcagtcgttcatgtaagcgagtatttacttcttctctcagattgtgggtttgcgccagcgcggcgatttgctcctgttgacgcgtccactgcgggcgtagctgctccgcgggctgggcattcagcaatacggtaagctgcggttgcgcctgctccagcgcagcctgcgcttcgcgtagcgcggtttgagcctgccgatcttctgccgtcagctctgcgccgcgtaccagccactgacgggcattttgcaggcgggtttgttcgctaacctgctgtttttcttcatcagtaagcgcttgcaaactttgttggagcgcctgctgctgttcgtcgctcagcagcagcacgccggaggcctgggcctgaattttctccagctcgacgcgggcctgcttatgcttttcaaagacctgtgccgaaatctggccgtaaatctcggtgccggtcagctcctccagcagctcggcgcgctctttcggtttcgcgttcaggaaggcggcgaactgcccctgcgacagcagcatcgagcgggtgaagcggccatagtccaggccggtgagcgaggcggtcagttccagcttatctttgaccttatcggcgaggatcttgccgtcctcgcagcgcgccagctcgacgcgcggaacctgcaggttgccgtccggctggtttcgcgcccggttctggctccagaaggcgcggtaggcgatgccttttacctcaaactccacttccgccaggcattcggcagtgtcgcgggtcatcagatcgttctgcgattgcgacacgctgctcaggcgcggggtttcgtgatacagcgccagacagatagcatccagcagggtggtttttccggcgccggttggcccggtaatcgcgaacagtccgttgctggcgaagggctcagcggtgaaatcaattttccattcgcctttgagtgaattgaggtttttcaggcgtaagctgagtattttcacaggcgatcctcaccgttcaggctatgcagcgtttcattaaagagctgttccaggcgctgctgctgcgtcgcttccagcgtttccagcgccagacggcgggcgaagacgtcctccacctgcagttcgctgagggtctcgcgctgagcgccggccagaatgcgatcgcgctgggcgcggctgcggcgcaccagcagcacttctaccggcagcgtttcggtctgcgcctggattttacgttggatatcatgcatatattcgtcgctggtgacttcgatatccagccacgctgagggctgctggtcgttattctgccattggtttagctgtgcgctaatgctggcgaaatcgcccttcaggaccgccagcggctgggtgacggggacgataagcggcgtgacgtccgtcaggcagccgttagcgaaagtgaccagattgacgctcttatttttcccggtttcgtcaaagctcagcgggatgggcgaaccgctgtagcggatatgttcgcagccgccgaccacctgcgcccggtgaatgtggccgagcgcgatatagtcggcgggcggaaaacggctcgccgggaaggcgtccagcgtaccgatatagatttcgcgaaccgcgtcgcttttgctggcgccgacggtggttaaatggccgctggcgataatcggcagcgcccggtcgccgcgcagttcgcaggccagctggtactgctgctggtagtaatcgctgatggcgctgagcagcagctgctgcttttcgccgccagagtgcccggcctggctggtcaccagctcacgcgggcgcaggaacggtaccggacaaaaaattgcccccggcgtaccgtcgcgcagcggcaggataaaaggggcgtggccggcattggccaccaccgtcgtattcaggaaggcgagaatgtctcgcgactcgttgagggtggcgaccgaatcgtggtttcccgccagcaccaccagccggcagcgggtctgctgcagctgaacgacaaagcggttatacagctcgcgcgcgtagctcggcggtgagccggtatcaaaaatatcgcccgcaacaataatggcatcgacatcatgttcctgcgcgctggccagcagccagtcgagaaacgcctgatgttcggcggcgcgacttttgctgtaaaaattttgtccaaggtgccagtcagaggtgtgaaggatgcgcatagttgttccatagcgaaaaagcgtaagcggcattatatacccgtcatccttcaagttgcttatgcgttggctacgtccagccacctggttacctgtgcttgtggggagtgaaacctgaattattgaggggataacgctgcttttgggtgagttaagtccgtgtcacaattcgaaatccgcgttcatctggcggtcatttttttcataaatctgtcataaatctgacgcataatggccgcgcacttctatactgatggctaaaaaatacagggtaaataatggcgagaagaattctggtcgttgaagatgaagctccaatccgcgaaatggtttgctttgttctggagcaaaacggctttcagcccgtcgaggcggaagattttgacagcgcggtcaatcagctcaatgaaccctggcctgatttgatcctccttgactggatgctgccgggcgggtcgggtctgcagtttattaaacagctcaagcgtgaagcgatgacccgtgatattccggtggtgatgctgaccgcccgcggcgaagaggaagatcgcgtccgcggcctggagaccggcgccgatgactacatcactaagccgttttccccgaaagagctggtggcgcgaattaaagccgtgatgcggcgcatttcgccgatggcggtggaggaggtgattgaaatgcaggggctgagcctcgacccctcttcgcatcgcgtcatgaccggcgaaaatccgctggatatggggcctacggagtttaaattactccacttcttcatgacgcacccggagcgagtctatagccgcgaacagctgctgaatcacgtctggggaaccaacgtttatgtcgaagacagaacggtagacgtgcatattcgccgtctgcgcaaagcgctggaacatagcggccatgaccggatggtacaaacggttcgcggtacgggatatcgtttctccgcccgtttctgaatgctgacaggagtgtgaaccgtgctggaacggctgtcatggaaaaggctggcgcttgagcttttcttgtgttgtatcccggccctgatcctcggggcgtttttaggttatctgccgtggtttttattggcggcagtgaccggtcttcttgtctggcatttctggaatctgatgcgcctgtcgtggtggctgtgggttgatcgcagcatgacgccgccgccgggcagcggcagctgggagccgctgctttacggactgcaccagatgcagatgcgtaataaaaagcgccgccgtgagctgggaagcctgattaagcgctttcgcagcggggcggagtctctgccggatgcggtggtgctgaccaccgaagaaggggtgatgttctggtgcaacggtctggcccagcagatcctgaatctgcgctggcctgacgataacgggcagaacatccttaacctcttgcgctaccctgaatttgccaattatctgaaataccgtgatttttccaaaccgctcaatctggtgctgaataacggccgtcatctggaaattcgcgtgatgccctatagcgataaacagctgctgatggtggcgcgcgatgtcacgcagatgcaccagctggaaggggcgcggcgaaactttttcgccaacgtcagccacgaactgcgcacgccgttgacggtgctgcaggggtatctggagatgatgcaggagcaggtgctggaagggggaacgcgcgaaaaagcgttgcacaccatgcgtgaacaaacccagcgcatggaaggcctggttaagcaactgctgacgctgtcgcgaatcgaagccgcgccggtactggcgatgaacgataaaatcgatgtgccgatgatgctgcgggtggtcgagcgcgaggcgcaaacgctaagccagcagaggcaggtgctgcatttttcggtcgatgaatcgctgaaagtactgggtaatgaagaacagctgcgcagcgccatttccaacctggtctataacgcggtcaaccatacgccgccgggcacggacattaccgtaagctggcagcgcgcgccgcacggagcgttgttcagcgtcgaagataacgggccgggcatcgcgccggaacatattccgcgtctgaccgagcgtttctaccgggtggataaagcgcgttcaaggcagaccggcggcagcggtctggggctggcgatcgtcaaacacgccgtcagccatcacgatagccgcctcgaaattgagagtacgctggggaaaggcacccgctttagcttcctgttgccggaacgtttaattgccaaaaattgagcccgagcggccgggtgtcagaataacttgccaatgaccagcttcggttggtcattttcctttgcagcgcaatcacagctgcgtaattaacgaacgctcgctgcttttttgttcgcatgataagccagatgttttctatccatcaggtaaataattctacgcatcaaaatagagttagcataatcatctgcttttgcgatccctccttgctttaaaacgttataagcgtttaaattgcccccctacggtcgcagacagactgtttttgcgtggtaattcaaaaaacaattcttttccacgccgctttgggagcatatcccgctgagtttactgacaatggccgctgtatcatccccaggggaaaggcgcggtatttatccgtttttacaacaccacatccacaggctgtaatgaatttatgacccatcagttaaaatctcgcgacatcatagcgttgggctttatgaccttcgcgctgtttgtcggcgcaggcaatattatcttccccccaatggttggcttacaggccggcgaacacgtctggagcgcggccattggctttctgattaccgccgtgggtctgccggtgctaacggtcgtggcgctggcaaaagtcggcggcggcgtagagagcctgagcacgccgattggtaaagtcgccggtatcctgctggcggtcgtctgctacctggccgtagggccgctgttcgcgaccccgcgtaccgcgaccgtctcttttgaggtggggattgccccgctgaccggcgacggcccgctgccgctgctgatttacagcgttatctattttgcgctggtgatcctcgtttcgctctacccgggcaagctgctggacaccgtggggaatttcctcgcgccgctgaaaattatcgccctgattattctcgccgtggcggcaatcgtctggcctgccggtcccctgagccacgcgatggaagcctaccgtaccgcgccgttctctaacggcttcgtcaacggctatctgaccatggacaccctcggggcaatggtctttggtatcgtgattgtcaacgccgcgcgttctcgcggggtgagcgaagcccgcctgttgacccgctacaccgtctgggctggcctgatggccggcgtgggcctgacgctgctgtacctggcgctgttccgtttaggttccgatagcggcacgctggtggagcagtccgctaacggcgcggcgattctgcatgcttacgtccagcacaccttcggcggcgcgggaagcttcctgctggcggcgctgatctttatcgcctgtctggtgacggcggtgggcctgacctgcgcctgcgcggagttctttgcccagtacctgccgttctcctaccgtacgctggtgtttatcctcggcctgttttcgatggcggtctccaacctcggcctgagccacctgattcagatttcgattccggtgctgacggctatctatccgccgtgtatcgcactggttgtattaagctttacccgcggttggtggcataattcgtcccgcgtaatcgccccggcaatgtttatcagcctgatgtttggtatcattgacggcattaaagcgtcggcgtttgcagagatgatgccgtcctggaccgcgcgtctgccgctggcggagcagggcctggcctggctgatgccaaccgccgttatggtggtgctggcggttatctgggatcgcgcagcgggacgtcaggtgacatccagcgcgcactaaccgacgctttacacaggtgtttaaccacgggacttcaggtcccgtggttttttgttttttggtcaccctcctttgttctttgcccccgcgaaggccagaggagaaaaacggcatggaacacgatggaaagtagtaacaagcttaagcgcgggctaagtacccggcatattcgctttatggcgctggggtcggcaatcggtaccggccttttctatggttcggctgacgcgattaaaatggcgggtccgagcgttctgttggcttatattatcggcggcgccgcggcctacattatcatgcgcgcgctgggcgagatgtcggtgcataacccggccgccagttcattctcgcgctacgcgcaggattatcttggcccgctggcgggctatatcaccggctggacctactgtttcgaaattctgattgtcgccatcgccgacgtcacggccttcggtatctatatgggcgtctggttcccggcggtaccgcactggatctgggtactcagcgtggtgctgattatctgcgccgtcaacctgatgagcgtgaaggtcttcggcgagctggagttctggttctccttcttcaaagtcgccacgattatcatcatgatcctcgccggtttcggcatcattatctggggtattggcaacggcgggcagccgacgggtatccacaacctctggagcaacggcggcttcttcagcaacggttggctggggatggtgatgtcgctgcagatggtaatgttcgcctacggcgggatcgaaatcatcggtatcaccgccggcgaagcgaaagatccggagaaatccattccgcgcgccattaactcggtgccgatgcgtatcctggtgttttacgtcgggacgctgtttgtgattatgtctatctatccgtggaaccaggtggggaccaacggcagcccgttcgtactgaccttccagcatctcggcatcacttttgccgccagcatcctgaactttgtggtgctgaccgcttcgctgtcggcgattaactccgacgtctttggcgtggggcgtatgctgcacggcatggcggaacagggcagcgcgccgaagatgttcgcgaaaacctcccgtcgcggggtgccgtgggtgacggtgacggtgatgacgattgccctgctgttcgcggtctatcttaactacattatgccggagaacgtcttcctggtgatcgcctcgctggcgaccttcgccaccgtctgggtgtggattatgatcctgctgtcgcagatcgccttccgtcgccgcctgccgccggaagaggcgaaggcgctgaagttcagggtgcctggcggggtcgcgaccacggtgattggcctgctgttcctggtctttattatcggtctgatcggctaccatcctgatacccgcatctcgctgtacgttggctttgcgtggattctcctgctgctgattggctggcagtttaaaacccgccgcgagcgaaaactggcgaaagcctagtcattttcgttctcttcttgccggatacgcacgggctatccggcaagctatccctccacccccgccatcctcccccaataattctgccgatgatgagtcatacgccagtacgctgtggcaaggtgtgcccattctgcaaagagaggaataatgatgttgaaggcatggcacctcccggttgctccgtttattaaggaacagcaggaacgactgattattacgctatggttaagcggcgacgatctgccgccgcgggtcacgctgcgcgcggaagaggataacgaagagctgtcgctgccgatgcaccgcctgcggcaggagccgcatccgggcgtggtggcgtggcgcggggaaatcagcctcgttaacgggcagccgcgtcggcgttacagcttcaagctgctgtgggccgaccgccagctgtggttcacgccgcaggggttcaaccgctttccgccggccaggctggagcagtttgcggtcgatctgccggacagcggaccgcagtgggtagccgatcaggtattttatcaaatcttccctgaccgttttgcccgcagcgagtctcgcgaagcgggacaggatgcgatttattaccatcacgccgccggtcacgacatcgtacgcaaagcgtgggatgaaccgctaaccgccgaggcgggcggctccaccttttacggcggcgatctcgatggtatcagcgagcggctgccgtacctgaagcagcttggcgtaacggcgctgtacctgaacccggtatttgtcgcccccagcgtgcataaatatgataccgaggattatcgtcgcgttgatccgcagtttggcggcgatgcggcgctgctgcgcctgcgccaccatacgcaaaaagagggaatgcgtctgatcctcgatggcgtgttcaaccatagcggcgattcgcatgcctggttcgaccgccaccagcgcggtagcggcggcgcctgccataacgccgattcgccgtggcgcgactggtataatttttcccccgagggcgttgcccacgactggctgggatacgccagcttgcctaagctggactaccggtcgtcgacgctgatcgatgaaatctatggcggggaagatagtatcgtgcgccactggctgaaagcgccatggagcatggacggctggcgcctggacgtggtgcatatgctgggcgaagagggcggggcgcgcaataacctgcgccatatcgccggcattacccaggcggcgaagctggagcggccggacgctttcgtgttcggtgagcatttcggcgacgcgcgccagtggctacaggccgacgttgaagactcggcgatgaactaccgcggctttacctttccgctgtggggctttctcgcgaacaccgatatctcctacgatccgcagaaaatcgatgcgcagacctgtatggcgtggatggataactatcgcgccggactgtcgcaccagcagcagctgcggatgtttaaccagctcgatagccacgataccgcgcgctttaagtctctgctcggcaaagatgttgcccgcctgccgctggcggtggtgtggctatttagctggccgggcgtgccgtgcatttactacggcgatgaagtgggcgtggacggcaataacgatccgttctgccgtaagccgttcccgtgggatccggctttgcaggatggcgctctgctcgaactgtacaagcggatgagcaagctgcgtaaggccaatcaggcgctgcgctacggcggctgtcaggtgatttatgccgaagataacgtggtggtgttcgtgcgcgtctataagcagcagcgcgtgctggtggcgatcaaccgcggcgaagcctgcgaggtggtggtggaggattcgccgctgctcgacgtcaacggctggcagctgaaagagggcgccggggcgctacacgacggcgtgctgacgctaccggcgatctccgccagcgtctggtttagccgctagtcgtaaagctggctcaggctttcactttgcaaaatggcctcgcgccaccagcgctgggccagcccgtcgttgccgctgcgccaggccatataggtgatatctttctcgcggcaggagatgacggccttttcgaccagctcgcctttttccagccacggccgggcaatgtggcgcggtaaaaagccgcagcccagcccggcgcgcaagagttcgactttactggcgaaatcatcgacgcggatttgcggctgctcgtcgagcaggttgctgttgagcggatggcagtagcgggcgctgtcgctgatgaccaccgcgcgatgcaggctgagctgcttgttggtcagcggttgggttgtttccgccagcggatgccccggcgcgatgacgaaaatattgtccatggcgccgagcattttccacgaccattcggcggaggtcggcggttcattgatcgccccgagaataatatccgcgccgttgtgggtgagctcttcccacgagcccgcaagggtatggtgggtaaagttaaggcgggtttgcggatgctgggcgtagaacgcgtcgatcagcggcagcagcgcgctaaacgggaaagagtcatccagggcgattgccagatcccgttcccaaccggcgctgagctgcaccgcctgcttttccagatctttggcggcattcagcagcaatcggcctttctccagcatcattctgcccgtatcggtaaatttcgcccggtgcccggagcgatccaacagagtgatattcagatcgttttccagcttttgaatcatgtagctcagcgcggcaggggttttaaatagcgattctgcggcggtggcaaaagagccatgtttgtccagcgcgtcgagaatcaacaggacatcaaggttcaggcgcatgcgtcagcttccggtaaaaaagagtgcctccgttttaccggagcgccctgttcaattccagtgaataatttagaacggttaaccgtaaaaatttgaaaaacataatttcgcccattttgtaatggttaatcgaatagccatcacttttcgctttggaaataaatcagaaaaaaatctttaataactcgttagaaattactgactatactcaccatgctttatcagtcaggatccagacagcacaacggaaacggtagtatctttttaactcattgattaacaggatatgttatgtctattcgtgaactgatcgatccctcaaactcagcgcttatttttattgaccaccagccgcaaatgtcttttggcgtagccaatattgaccgtcagaccctgaaaaataatacggtggccttagccaaagcgggcaaaatttttaatgttccggtgatttatacctcagtagaaaccaaaagcttcagcggctatatctggccggaactgctggccgtacatcctgatgtgaaacctattgaacgtacctcaatgaattcctgggaagacgcggcttttgttgaagcggtaaaggcgaccggacgcaagaaactgattatttccgcactgtggacggaagtctgcctgactttcccggcgctgatggcgctggatgcgggctatgaagtttacgtggtgaccgatacctctggcggcacctcggttgatgcccacgaacgctccattgaccgtatggtgcaggccggcgcggtgccggtaacctggcagcaggtgctgctggagtaccagcgcgactggtcgcgtaaagagacgtatgacgcggtgatggacctggtgcgcgagcacagcggcgcctacgggatgggcgtggattacgcttataccatggtgcacggcgccccagagcgtaaagcttaaatacacttcatccttcaagctgcctctttgttggcttcgtttgtccgccccggtcactgactcatgtcagctcccggggacgaacaaccttgccgcctcgacgcagcatgaatgattttgtgtattggcctcatccttcaagctgcctctttgttggcttcgtctgcccgccccggtcactgactcatgtcagctcccggggacgaacaaccttgccgcctcgacgcagcatgaatgattttttgtatggtcatgtatagcgaatggcggcggacaacccgccattccctgaagcaaggaactcttaatggcgcaacagaaatcggtgaccctggtgatcagccatgtgctcgacccggagcatggccagcagtatgaagcgtggctgggcaaaattatgccgattgcggcagagtttcccggtcatcttggcgcaaacgtcattcgtccggcccccgggcagaatttatggagcgtgattattcgcttcgacaccattgagcatctttacgcctggacccagtcggagacccgccgccagcttgtggcggaaattgcgccgctgctgagcgaaggcgatcgtaccgaagtccggactgaaccggccttctggtttacgccgcccgcggcgaacgtgcgccagccgcgacgctggaagcaatttttaatcaccctgctggtgattttccccagtactaatctggtgccatcaataaccggaatactgttgccctcgttgaagggaagcctgttgctgcatctgatcaatgatgcctgtgtggtcgcgctggtggtctggttctggatgcccatcgtgacccgtctgtttgctggctggttaaagaaaaactgagccagcctcctgaaggagtgcgttatgtcgcaaactgccacactgatcctgacccacggtcgggttcatactctcgatcgtcaaaatcccctggccgatgcggtggcgatcgctgacggtaaaattctcgccgtcggtagccacgatcggatcatgagctttgccgcggacgggacgcaaattatcgatctcaaaggccatacggcgatccccggcctgaacgactcccacctgcacctgatccgcggcggcctgaactacaatctggagctgcgctgggagggggttccctcgctggcggacgcgctgcggatgctaaaagatcaggccgaccgcacgccgtcgccgcagtgggtgcgggtggtcggcggctggagcgagttccagttcgccgaacggcggatgccgacgctggaggagcttaacgatgcggcgccggatacgccggtatttgtcctgcatctgtacgatcgcgcattgctaaaccgcgcggcgctgaaggcggtgggctacaccaaagagaccccggatccggcgggcggcgagatcgttcgcgacggtaacggcaacccgaccgggatgctgatcgccaaacccaatgcgatgatcctctactcgacgctggccaaagggccgaagctgccgctggaacttcaggtcaactcaacgcggcagtttatgcgcgagctcaatcgtctggggctgaccagcgctattgatgccgggggcggttttcagaactacccggaagattatgaaattattgaacagctgcacgccaaagagcagatgaccgtacgtatcgcctataacctgtttacccagcggcctaagcaggagctggaagattttgagcgctggaccgatatgctcaagccgggacagggcaccgatttttaccgcgccaacggcgccggggagatgctggttttctcggcggcggatttcgaagacttcctccagccgcgtccggatctgccggaagggatggaagatgagctggagcgggtggtgcgccatctggttgaacaccgctggccgttccgcctgcacgccacctatgatgaatccatcagccggatgctcgacgtcttcgagaaggtgaatcgcgatattccgttcaacgggctgcactggttcttcgatcatgcggaaaccatcaccgagcgcaatatcgaacgcgttaaagcgctgggcggcggcattgccgtacagcaccgtatggctttccagggcgaatattttgtcgaccgctacggtaaagacgcggtcaaacatacgccgccggtcgcgaaaatgctcgaactggaggttccggtgggtctggggacggatgccacccgcgtggcgagctacaatccgtggaccgcgctttactggctggtatcagggcgtaccgtcggcgggatggcgatgtacgacgacagcaaccgcctgccgcgcgacgtggcgctggagctgtggacggcgggaagcgcgtggttttccagcgagcagggcaagaaagggcgcattgagcaaggccagcttgccgacctggtggtgctgtcgaaagactacttcagcgtcgcggaagaggaaatcaaggggatcgagtcggtgctgacggtggtggacggcaaggtggtgtacgcggcgggacacttttcgccgctggcgccgccgcctattccggtgctgcccgagtggtcgccggtggtgaaagttccgggccattaccgttccgcgccgccgacggccgcgaatatcggcgcgatagttcagatgcaccagtgctgcggcagctgcggcgtacatgggcatcagcatgatattgcgcgcaaatcggcgattccggttgccgatgagcaggcgttctggggcgtactcggctgctcctgctttgctttttagcgcgacgggcgcttattagtaccggtaggccaatgagagcatcaacgccctcattggcctttttcattttctcggatagcgctgataagacaatgtgtgtcattctgctccctcttcaaacagtgaaggtgagaacatggatgatctactgatctttggcgctgtgattttattctgcgggctggtggttgggccgctcgtggcgattgccgcgctcaggcgcagcgcggcggtccgtgtggaactggcggctttgcagcgtcgggttgaggagcttgagctgcgcggcgttgcgcaggcaccggtggcggagacaagtggcgtcgtgccgactgctccggaagtcgttgcttctgttgacgcaacagcgctggtagaacatgagtcatcaccggcgcccgtggcggaagccgttgacccatggctttcgcagccgaagccaacgccgaagccggagcagatggcgaaatcggctcctgaaaccgaacaaccttccgcgtttggcgggatggtatcgtcattggttcgttggtttatgcagggtaacccgctggcgaagctcgggatcctgctgctgtttcttggcctctcctttctgctgcgctataccgtggaacacgctcttttccccctcgagttgcgtctggtcgcggcgtcgttgttcgccattgtcctgctggctgtcggatggcgattgcggcataagcaaccgatgtacgccctgatcttgcagggtggggcaacgggggcgctctatctcaccgtttttggcgcctttcgcctgtggcagatgctgccgatgaccctggcgtttgcgctgctggtggtgatttgcgcggcgagcgtagggctggcgattgtgcaaaaagcgctcagcctggccatgctggcgagtcttggcggttatcttgcgccgctgctgctctctaccggcggcggcagtcatgtggcgttgttctcattctatcttctgctgtcggtgggcattcttgccatcagcatccgccagcactggcgggagcttaatctgcttggcctgctgtttacctttggcgtcggtggcctgtgggggctgaatgaatatcggccagagtattacctgagctgccagctgttcttaatcgccaatacgattatttttggcgtgttaagcgtggcgctgtcgctgcgggcgcaggaaaagggtaagcagattattgacggcgttctgctgtttgcaccgccgctggtcggctttggtatgcagtacgctatcacccggcatatggaatacggtccggcgctcagcgcgctgggctacggtggcttctatctggctttagcctggctggcactgcgtcgctacccctctttagggaagccgctggtactggccgcgctggcgctcggcggcgcatttaccacccttgctattccccttgcgctttcggctcgctggaccgcgatggcctggtcgctggaggggctcgggatcctctggctgggcgtgcaacagcagcagcggcgtatgagctatagtgggactgcgctactctttttggcggttggcagcgcgctctgggcgcaggcaaatgacgccacgccgctttctttgctgctgattttcgctgtactcagtcttagctggctggtcgccgcctggctgtggcgaagcattgaagtgcacgccagtggaggactgcttttgggcgggctactgttctgggtggtggcgcttgtcggcgcatcgcagctggcgttgagtaaagactcgcagattatatttggcgtgctggcgacgctggccgcgtcggtatggtgctggcgcgcggtcgctgcgcgtttagtctggcaagagctggatgccagcaaatggttgttgtggccaatgatgctgatagtgctgttttatcagctatcccaacggcagattttcgctgctggctggcaaaatctggcctggtgcgcggcgctgcccgcggcggtggcgctgctctggcgtgatgggccttcgctcccgccgcgcataaacaggctcgcccacctgtcgctgttctggatggtgttgctggcgctggcgatggagctgttttggtttacccgggatttgccgtggggcatgtcggcctgggcgagtggattaatgatggcggcaggcggggggctgatcttccttgtctctgaagccgttcatcggcaaatatggccattccgggtatggcctgggctgtatgcctctcaggccatgataccggtggcggttgcgctgggatgcctgctaacgctgacgaacgtgcaggatggtacggtctacggtcagacctatttgccgttgattaacccgctggaagagggcgccgcttttgcgctgcttgggctgacgatattttatcgcgtttcgcggcgttattttccgctgcagctatcggtatgccgcccctggcccgcggttgcgctgctggcgctcggcttctggtggctgaatggcctgctgctgcgcgccctggcctggtacggcgaggtggcctggaatatagaggcgctgtggcattcgcgcttaattcagaccactttcgctctggtctggacgctggcggcgctggcggtcatgctgcgtgcgacgcggcgacactcccgccgcgaatggctgtgcggcgcggcgttgttaggcgttgtcattgtgaaactcatgctggtggacagcgcgcgcggcggcgggctggcgcgcgctgtcgcgtttatcggcgtggctattttggtgctgatcgtcgggtatttttccccgttaccgcccaaagcaggagaagaaaaatgaaatggatgaaagcggtgttatgctgcgtgctgctgggcgtgacgggcgcggctgtcagcggcgatgaagcgcgagaaaaaccactggactatatgcaggggatgatgctggaaaccaccggcgcgtcgccctggtatcgcgtcgagctttccccgctgctctatcaggggacggcgtggcctgacctgcgcgatgtgcgggtatttaaccatcagggagagaccgtaccgttcgcgctgcaggtgcagaaggcgcagcccgttacgcctgaagcgatgacgctgcggcttttccctctggagatgtcgccggttccgccgcgcgaagaggggcgacgcggcggagaatcgctggtcctgcgttcaacaacggggatcgaaattcatctggaaaccgatgatgcgaaggcgctcgggcagagctacttactgacgctaccggcggagaaaacggacgcgtttgcgctggctcagctgcggctgaactgggcggcgctggcgggcagctggcaggggaaagcgtcggtctattccagtcgggatttgaagtactggcgccctgtccaggaggatgcgccccttatggatctggcgcgcgatagcgatcgtttgaaaatggataccataagcgctgacctgacgctctccgcggacgggaatcgttacctgctggtgctcctcgattcgcaaagcaaggcggtcgtgttaaatagcgtgacggccctggccgaacgcagagagcccgagtctacgcgcattgagcttgatgcgcaggcgaacaagatttcagatgaggaagccgtttggcgctgggcccggcctcagccgctgacttcgctcaggatatcgatggccagcgaaggggttctgccggtcgcgctctcctggcgcagcggcgaaaaagaagcctggcagccgctgaccaaaaccgtgctgtatcgactggacggcaagcgttcggaggatattcaactttcagcccagccggttgaagcggtgcggatcacaacgattaacgcccgattaccgacgtcgctgcccgcgataagcggtgcgcgagacaaataccagctgatttttaatacccagggaaaagggccttatatgctggcctggggcaaccgggcggcgccaaaggcagatgtcgccatggacatgctgataccggcgtcgctgcgcaaaacgcaggctgtaagcgatctaccgctggccgtcgcgcaggagagcgtcaccctcggcggtgaagcgcggttgacggcgacgtcggctaccgagcagcaaagcggctggaaaacgctgctggtatggggagcgctaatagtgggcgtcctggtgctggcgctgatggcgtggcgaatctggcgcgaagtgaaaaaaagcggctccgtataaaacaaaaaaggctcgcatctgcgagccttttgccgaacgtacgccgattacaggctggatacgttctcggtcaggtatttagcgacgccttccggagaagcggccataccttcttttcctttttcccactgcgccggacaaacttcgccgtgctcttcgtggaactgcagcgcgtcaaccatacgcagcatttcgtcgatgttacggcccagcggcaggtcgttaaccacctggtgacgaacaacgccgttggcgtcgatcaggaaggaaccacgcagggcaacgccttcgtccgggtgctcaataccgtacgctttctggatttcgcgtttgatgtcagcaaccatggcgtatttaaccgggccgatgccgccctggtctaccggggtgttacgccacgcgttgtggacgaactcggagtcaaaagaaacgccaaccacttctacgccgcgtttctggaattcttcgtagcgcttatcgaacgcgatcagttcagacgggcaaacgaaggtgaagtccatcggccagaagaacagaacggtggctttaccgctggtgtgctgtttgaagttgaatttctcaacgatttcgccgttacctaaaaccgctgccgcggtgaagtccggagcctgacgagtaaccagaaccatatgattctcctgttaatactaaggttaattggaacgcaacgcgggcaagtatagggagaggcgccggcgaactcaacgcgacgctgacaatcgatgagataggttttgcctatcaatcgttatttgaaacggctattcagaatagtcttttgccaaaaaagcgcaatcttttacagttcaccttttttcgcctgcgccatcatctgcgggtagaagcgccagaactgctgctcaagacgatcgtaatgggtatccagatcctgccaggagtcgcgcagggcgtccagccgcggacggcggctggccataccgttcagaacccgctgaataaacgccatatcccgatagcgttcaagccagcgctctgaccacaggtattcgttgagattgacaaaacgcggcggggaatcgggcaaaataaacgagacctgggcgtgggcgtagcggacaaactccggcagcggcagctcgggcgacagctgcgtccagtggcgtgataagaaatggtcccacatcacatccagcgtaattggcgcgacccggcgcgtttcgggacgaaaccaccctttggcttcggtgacttcgggcaggttatccgtcagtacatcgatccggcggtgcataaaaatgccctccacgacgtcagcgggccactcgccggcggggtcgccgcgaacgaaatcggccagtaaattaccggaaagggagctgtcagcgagatgggcgaggtgcaggtgtgcgagaaaattcatgcgattcgttatccggatacggctagttgttgcagcgaagaggtgtgagcactagactaagccgcctgtttttaagtcatgagtatatgccatgcgcgtcgccgatttctcctttgaattacccgaatccctgattgcccactatcccatgcccgagcgcagcagctgccgcttgctgtcattagacgggccgacgggcgcgctgacgcacggtactttcaccgatttactcgacaagctcaaccctggcgatctgctggtttttaataatacccgcgtgatcccggcccgcctgtttggccgtaaagccagcggcggcaagattgaggtgctggtcgagcgcatgctcgatgataaacgtattctggcacatattcgcgcgtctaaagcgccgaaaccgggcgcggcgctgctgctcggcgacgatgaaagcattaaagcgaccatggttgcgcgccacgacgcgctgtttgaagttgagttcgacgacgcgcgcagcgtgctggacattctcaacgctatcggccatatgccgctgccgccgtacatcgatcgtcctgacgaagacgccgaccgcgagctgtatcagaccgtatacagcgaaaaaccgggcgccgttgcggcgccaaccgccggcctgcactttgaccagccgatgctggcgaagcttcgcgaaaagggcgttgagatggcgttcgtcacgctgcacgtgggggcaggaaccttccagccggtacgcgtagacagcattgaagagcatattatgcactctgaatatgcggaagtgccgcaggaggtggtcgatgcggtgctggcggcaaaagcgcgcggcagccgggtgattgcggtgggcacgacctcggtgcgttcgctggaaagcgcggcgcagacggcgaaaaacgacctgattgagcctttcttcggcgatacgcagattttcatctacccgggctatcagtacaaagtcattgatgcgctggtgaccaacttccatctgcctgaatccacgctgattatgctggtttccgcatttgccggctatcagcacaccatgaacgcctataaggctgcggtagaacaaaaatatcgcttttttagctacggggacgcgatgtttatcacgtacaatccgcaggctatttttgagcgcccataagaaggctgtcgcgctggttattttgacgccttcaggaatttattagctatggaatcattccgtagcgagtcgttaaacgtcagactgtttttctgacgcgggagtgataatgaaatttgagttagataccaccgatggtcgcgcgcgccgcggccgtcttgtgtttgagcgcggcgtcgttgaaacgccagcctttatgccggttggcacctatggcaccgtgaaagggatgacgccggaagaagttgaagcgaccggcgcgcaaatcatcctcggcaacaccttccatctgtggctgcgtcctggtcaggagatcatgaagctgcacggcgatctgcacgactttatgcagtggaaaggaccgatcctcaccgactccggcggcttccaggtcttcagcctcggcgatattcgcaaaatcaccgagcagggcgtgcacttccgcaacccgatcaacggcgatccgattttcctcgatccggaaaaatccatggagattcagtacgatctcggttccgatatcgtgatgatcttcgacgaatgtacgccgtatccggcggactgggattacgctaagcgctcaatggaaatgtccctgcgctgggcgaagcgcagccgcgatcggtttgacggtctgggcaacaaaaacgcgctgtttggcatcattcagggcagcgtttacgaagatttacgtgatatctctgttaaaggtctggtagagattggctttgatggctacgctgtcggcggtttggctgtcggcgagccgaaggaagatatgcaccgtattctggagcacgtctgcccgcagatcccggccgacaagccgcgatacctgatgggcgtcggtaagccggaagatctggttgaaggggtgcgtcgcgggatcgatatgttcgactgcgtcatgccgacgcgcaatgcgcgcaacggccacctgttcgtcaccgacggcgtggtgaaaatccgtaacgcgaagcacaagagcgatacttcgccgctggatgcagaatgtgattgctacacctgtcgcaactattcacgcgcttacttgcatcatcttgaccgttgcaacgaaatattgggcgcgcgactcaataccattcataacctgcgatactatcagcgcttaatggctggtttacgcaaggctattgaagagggtaaattagagagcttcgtgaccgatttttaccaacgtcagggtcgaaccgttccacctttgaacgttgactaattttaataatgagggaatttcaatgagcttttttatttctgatgcggtagcagcaaccggtggcgcggcgcagggcagcccgatgtctctgatcctgatgctggtggtgtttggtctgattttttacttcatgatcctgcgcccacagcagaaacgcaccaaggaacataaaaacctgatgaactccattgccaaaggcgatgaagtactgaccaacggtggcctggttgggcgcgtcactaaagtcgcggaaagcggctacatcgctatcgcgctgaacgataccactgaagtggttatcaaacgtgacttcgtagctgccgttctgccgaaaggcaccatgaaggcgctgtaattacccattttccctaagggaactgccgtgttaaaccgttatcctttgtggaagtacgtcatgctggtcgtcgtcattgtcgtcggcttagtgtatgcgcttcccaacctgtatggtgaggatccggccgttcaaatcactggcgcgcgcggcgtcgccgccagtgagcaaacgctgatccaggtccagaaaacactacaagaagaaaaaattaccgcgaagtctgtggcactggaagagggcgcaattcttgcgcgcttcgacaccactgatatccagctgcgcgcgcgcgaagcgctgatgggcgtactgggtgacaaatacgtcgtggcgcttaaccttgctccggcaaccccgcgctggctggcggccctgtatgccgagccgatgaagctgggtcttgatctgcgcggcggcgtgcacttcctgatggaagtcgacatggacaccgcgctgggcaaactgcaggaacaaaatatcgacagcctgcgcagcgagctgcgtgataaaggcattccttacgcgaccgtgcgtaaagaagacaactatggcctgagcatcgctttccgcgacagcgccgcgcgcgaccaggctatctcataccttagccctcgtcaccgcgatctggttatctcctctcagggcagcactggcctgaaagccgtgatgaccgacgaccgtctgaaagaagcccgcgaatatgccgttcagcagaacatcaatatcctgcgtaaccgtgtaaaccagctgggcgttgccgaacctctggttcagcgtcagggcgccgaccgtattgtggttgaactgccgggtatccaggacaccgcgcgtgcgaaagagatcctcggcgcgaccgcgaccctggaattccgtctggttaacactaacgttgatagcgccgcggcggccgccggtcgcgttccgggcgactcggaagttaaatatacccgcgaaggccagccggttgtgctgtacaagcgcgtcatcctcaccggtgaccacatcaccgactcgacgtcgagcatggatgagtacaaccaggcgcaggttaacatctccctggatagcgctggcggcaacatcatgtctaacttcaccaaggacaacatcggtaaaccgatggcgaccctgtttgtggagtacaaagacagcgggaagaaagatgccagcgggcgcgcgattctggcgaaagaggaagaggtgattaacatcgccaacatccagtctcgtctgggtaacagcttccgtattaccggcatcagcaacccgaccgaagcgcgccagctctccctgctgctgcgtgcaggcgcgctgattgcgccgattcagattgttgaagaacggaccatcggtccaaccctcggtatgcagaacatcaagcagggcctggaagcgtgtctggccggtctggtggtctctatcctgtttatgatcttcttctacaagaagttcggcctgattgcgacctctgcgctggtggctaacctggtgctgattgtcggcattatgtccctgattccgggggcgacgctgaccatgccggggattgcggggatcgtgttaacccttgcggtggcggtcgatgcgaacgttctgattaacgaacgtattaaagaagagctgagcaacgggcgctccgtgcagcaggcgattgacgaaggttatcgcggcgcgttcagctccatctttgatgccaacattacgacgcttatcaaagtcattatcctgtacgcggtcggtaccggtgccattaaagggtttgcgattaccaccggtatcggtattgcgacctcaatgtttaccgctatcgtcggcacccgtgccatcgtgaacctgctgtacggcggcaagcgcgttaaaaagctgtctatctgaggagtgcgttgtggcacaggaatatactgttgaacaattgaaccacggccgtaaagtctgggactttatgcgctgggactactgggctttcggcatttcaggttttctgctgattttgtccatcgctattattggcgtgcgcgggtttaactggggtctggatttcaccggcggtacggtgattgagatcaccctcgaaaaacctgtcgatatggaccaggtgcgtcagtcgctgcagaaggcgggctttgaagagccgcagctgcaaaacttcggcagcagccgcgacatcatggtgcgtatgccgccggtgcatgacgccaacggcagccaggagctgggcagcaaggtcgttagcgtgattaacgactcgaccagccagaacgcgacggtcaaacgtattgagtttgtggggccgagcgttggcgcggaccttgcgcagaccggcgcgctggcgctgatagccgcgctggtgtgtatcctgatctacgtcggcttccgctttgagtggcgtctggcggcaggggtggttatcgcgctggcgcacgacgtggtgatcaccatgggcgtgctgtcgctactgcatatcgagatcgacctgaccattgtggcctcgttgatgtcggttatcggctactcgctgaacgacagtatcgtggtatccgaccgtattcgtgaaaacttccgcaagattcgccgcggtacgccgtacgaaatctttaacgtgtcgttgacgcaaacgctgcaccgtaccttgatcacctccggaacgaccttgatggttatcctgatgctgtacctcttcggcggtccgattctggaaggcttctcgctgaccatgctgatcggtgtctccatcggtacggcttcttctatctacgtcgcgtccgcgctggcgctgaagctgggcatgaagcgcgagcacatgctgcagcagaaagtcgagaaagaaggggcggatcagccgtcaattctgccgtaaggcaatcgcgtagcgataaaacgaatcccggtcgcaaggccgggatttttttattacagccgcccggattttggttactctcccgtatcagcacgcaatgacatggagaaatgccgatggctgtcgtaacgctttccaccgttcctcaacccccgctctggcacgatgtgccttccgttacgcttaacgacgacacgctgcggctgcgcaagtccagggtgctggcaaatatgcgtcagtccggcgtagacacgcttattgtctatgccgacaaagagcacggcggcaactttgagtatctcaccggctttattccccgtttcgaagaggcgctgctggtgctgcatcgggacggcgaggcggtgctggtgctgggtaacgagaatctcaagctggcaggccatgcccggctggaaaaccgtgtgattcacgccccgtggttttcgctgcccaatcagccgatggaaaccggtaaaacgctggctcagcggcttcaggaggcgggcgttgcggcggaaaaacgaattggcctggcgggctggaagctctttaccggcgcggcggatgaccgcgcgcagatgttcgatctgcctgcttttatcgtggatgctattcgccaggccgccggcccgcaggcaagattaactaacgccaccggcatttttatcgacccggcaagcggagcgcgagtcaccaataatgccaacgagctggcgcactatgagtacggcgcaaatctggcttccaccgcgattctcaccgcgcttaacgccgttgcgccgggtaaaacggaaaagcaaatcggcgcgctgctggcggcggaagggcagcctaatagcgtggtgatgattgccgctaccggcgagcgcttcgcctgggcgaatctctatccgggcgataaggtgattcagcgcggagataaattctcgctgaccaccggcttcaaaggcggcctgagcagccgcgccgcctacgtggtggccgatgagagcgaactggcgcccgaggtggctgattatctcgaggtcgtggcgaagccctatttcaacgcggtggtgaactggctggaaaatctgcgcatcggcatgcgcggcggcgatatgtatacgctgatagagcaggcgttgccgaaggcggaatatcactggcacctgaatccggggcatctggtcgcggatgaggagtggctctgttcgcccattggcccccattcaaccgcctgcctgcaaagcgggatgatactgcaaatcgacatcattccttcccgcccgggctacggcggcgcaagcattgaagataccgtggcgcttgccgatagcgcgttgcgtcgggagctggcgcagcgctatcccgaactctggcagcgtatcgtcgcccggcgcttgtatatcggcgagcagcttggcattgtgcttcctgaagaggtgctgccattttccagtaccgtgggatacctgcgtccgtggctgctgagtcccgagcgcgcgctggtgtgcgcaccatactgacacaatgctgtcagtaggcctgtcttacactcctcctgaacccaaacaatggacaggaggatgtatgaacaacgtaattaactggtttgagatcccggttgcggagatggatcgtgccgtggcgttttacgagccggtgatgcaggtgacgctgcgtcgggaaaaaatggattgcatcgagatggccgttttcccgcatgaggatccggctcccggcggcgcgctggcaaagttcgatggcgttaagccctccgatcagggatgtattatctatctgcatactgacaatctggcggccacgctcgatcgcgtcaactcggcgggcggaagctgcgtgtttggcccccttgagctggcggacgatatcggcacgattgccctttttattgatagcgagggtaatcggattggccttcaccaacccgcgtaaatgagacaacagaaatgagccgacgcgccgaccgcctttttcaaatcgtccagatcctgcgcgggaggagattaaccaccgccgggctgctggccgagcggctcggcgtgtcagagcgcaccatctaccgcgacattcgcgacctctcgctctccggcgtcccggttgagggggaagcagggagcggctaccggctgctggcgggctatgacctaccgccgctgatgctgacaactcaggaatcggaagcgctgatggccgctatacggctgctgcaaacctggggcggcgcctcgctgtcccaggcgctggagtcggcgcaggaaaaagtgctggccattttgcctgccgagagccggcgtaaggcggagcagtcgcgcgtgttcgcaccggactttggtgcacagggctatagtaaagatcagtttgatatagtgcatcgggcagtctccgcccagcaggcgctggggctgcgctatcgcgatgaagcgggaaacgtgtcgcagcgtgacgtactgccgctggggctttttttctggggcgagcgctggctgctggtgacctggtgcgaactgcgggaagattatcgctgttttcgcctcgaccgctgtctggagatttccgccaccgggcgtcatttcagcgaacgagccgatcgctcattgagtgatttcttgcgtaaggtgagatgcgaagagcgttagcttttatgatccccggcgtagttgccggggatcatcgagccgattagaagttgtagccgaccacgaagtaaccaccccagccggtagagcggacgttaaagtcgccgtcgccgaagttcagcttcgcgtcatccgcccactggccgccgttgtggaagtaacgcgccacgacggagtagtgccagtgatcgtagttcagcgccaggatatggctggacgcgatggagttgctggtgcgtgaatgcttaccgttcaaatcataagcgttgtcatcgcccagatcggagccccagtcaaagttggtgaagccgatatagctcagtgaaccgccccacaggtcggtcagcggcacgaagtatttcactttgaagcggtagccgtcccactcgttctcgtttgatgcgccatagttttgccactgatatttcgcatagacgttgagcgagaggctcatcggcaggccggtatcgatatcggtacccagacccatataccaggtgctctgacgaccggacttgttgcggcccatgtcgtagatatagttgttagcgaaataccactctttgaacgggccgaagctgaggtcggtaccggtcagtttgtcgatggagaagcgcggctcaatttccataaacagcggagaaccgtggttccagatacccttcgcgttggtgttaccaccgaagaataccggcgcatccatatagccatagaaatcaaaccagtctttcttggcgaacgcttcatattccagataagtatcgttacggatctgcggcccaaaacgagtgtggtagctacccaccacgtttacactctggtgccaccaatcagacaggtattgcggtttgtcgttttctgccgcgctggcagagaaagatgcggagagcgccagagctgcgccggctgccagtaatgtttttttcataatgatgccactgtttaaattaagcctgaaggcgttaaaagaagcgccgaagcgtttctaaatatttcgtatttctgtggcgtctattataggaatcattgctcacaaaaatatgtgttgtttcacataacgaacatatgcgtaatcgattgcgttcacgattttatgcatttcttgcgggaatgccaccgaaattcataaattctggcaatttttagtgaactgaatggaaaatctgtaagtggattagcatgaggggaggggagccggatgttcagggcatccggctgagggcgttacggcgtgtttgcgggctggatatcgtggatgcggacaaagccaacctgctcgggcgttacgccattcaggcgtagcggaatatcgacgtcgctcggcgccagaacgcttgccggcgcgctaatcagctgattttgtacgttaacttcctgatagctatcggtggtgccgctgatctgcccggaggcgaccgtcgcgctaaaggccggcagcggatcgtttgattcaccctggatacgcagggtcaggcgggtaccgtcgccatccggcgcgatattgagcagcgacatgcgcagcgtaccaatctgacttttgagacgggccggcgttttcgcctccggcagcaggtatacgccgctgctcgatttcgcattcagcacgttttgctgggtaattttgaccgtttgctggttgagctgggtcatctctttgctcagcgtgctcacgctctggttcatctggcggatttcgctttgctgcgcgcaggcgctgagggtgaaaatgctacccacgatggccagctttaaataacgtcttgtcatagttgggattccgttaacagaggatgcttaatggtagaccgatcggataatcgcactatagatcctttgtctcaaaagctctttctttgttgtcgggtcacttcgcggtaaactacccgttagtttaactacatgtcaggacgcgccatgcattgccctttctgtttcgccgtagataccaaagttatcgactctcgtctggtgggcgagggctcttccgtgcgtcgtcgtcgtcagtgtctggtctgtaatgaacgttttacgacgtttgaagtggcggaactggtgatgccgcgagtcgtaaaaagcaacgacgtgcgcgagccttttaatgaggacaaactgcgcagcggtatgctgaaagcgctggagaagcgcccggtcagctcagacgatgtcgaaatggcggttaaccatataaaaacccacctgcgcgggaccggcgagcgggaagtgccgagcaaaatgatcggcaacctggtgatggagcagctgaagaagctcgataaagtcgcctacatccgctttgcttccgtctatcgcagcttcgaagatatcaaagagtttggcgaagagatcgcccgcttacaggactgagcccatgcaggatgaaatatacatggcgcgagcgctgaagctggccgcgcgcggacgcttcaccacgcacccaaacccgaatgtcggctgcgtgatcgttaaagatggccagatcgtcggcgaaggttttcactatcgcgccggtgaaccgcacgcggaagtgcacgcgctgcgcatggcgggcgaaaaagcgaaaggtgcgacggcgtacgtcacgctggagccttgtagccatcacgggcgcacgccgccgtgctgcgaggcgctgattgccgcaggggtgacccgcgtggttgcggcgatgcaggacccgaacccgcaggtcgcgggtcgcggtttgtaccgtttgcagaaggaaggggtcgacgtcagtcacgggctgatgatgaacgaagccgaggcgctgaataaaggttttcttaagcggatgcgcaccggttttccctggattcagttaaaaatgggcgcatcgctggatgggcgcacggcgatggccagcggagagagccagtggatcacctcaccgcaggcgcggcgcgatgtgcagcgcctgcgcgcgcaaagccacgccatcctgaccagcagcgcgacggtgctggcggatgacccggcgctaaccgtacgctgggacgagctcaacgccgacactcaggcgctgtacccgcaggaaaacctgcgtcagcctttgcgcatcgttatcgatagtcagaatcgcgtcacgccgcagcatcgtatcgtggagcaggcgggtgaaacgctgtttgcccgtacccgtgcagatgaacgccagtggccggagaacgtacgcacgctgctggtgccggagcataacggtcgcctggatctggtggtcctgatgatgctgctgggcaaacagcaaattaactcgatctgggtggaagcaggccccacccttgccggcgcgctgctggaggccgggctggtggacgagcttatcgtctatattgcgcctaaactgttaggcagcgatgcgcgcggattatgtgtactgccggggcttgagaaacttgagcaagcaccccatttcaaattcaatgagatacgtcatgtaggcccggatatttgcctgcatttagtgaacgcttgatttccccggacaaaagggaaagcagtgcgccgattattatgatagaatccgccccccttgcggggccaaatgaactgaacccgaaggaagagtatgaacattattgaagctaacgttgctaccccggacgctcgcgtcgccatcaccatcgcgcgtttcaacaactttatcaacgacagcctgctggatggcgcgattgacgccctgaagcgtattggccaggtcaaagatgaaaacattaccgtggtttgggttccaggcgcgtatgagctgccgctggcggctgatgcactggcgaaaaccggtaagtatgacgcagtgatcgcgctgggtaccgttatccgtggcggcaccgcgcactttgaatatgtggctggcggtgcaagcaatggcctggcgcacgtcgctcaggacagcggaatcccggtagccttcggtgttctgaccacagaaagtattgaacaagccatcgaacgcgctggcaccaaagccggtaacaaaggcgctgaagccgcgttgaccgcgctggaaatgattaacgtattgaaagccatcaaggcctgatttttgtaaggggaattccgtgaaacctgctgctcgtcgccgcgcccgtgagtgtgctgtccaggcgctttactcctggcagttgtccaaaaacgacatcgctgatgtcgaataccagttcctggcggaacaggatgtgaaagatgtagacgttctgtatttccgcgaactgctgtccggagtggcgactaacagcgcgtatctcgacggcctgatgaagccgtatctttctcgtctgctggacgagctgggtcaggtggaaaaagcggtgctgcgtatcgcactgtttgagctgtcaaagcgtagcgatgtaccgtacaaagttgcgattaacgaagccatcgaactggcgaaaacctttggcgctgaagatagccataagtttgtcaacggcgtgctggacaaagctgccccggtaattcgtcccaacaaaaagtaaattccagggccggtttttgcagagtctcacttctgcaaaccggccttattcttttctttttctgaggcataacgtatggcatgcggcgaattttccctgattgcccgttattttgatcgcgtaaaaagcgcacgtcttgatgttgaaaccggcattggcgacgactgcgcgctcctgaacatccccgagaaaaaaacgctggcaatcagcaccgacaccctggtggcgggaaaccattttttacccgatattgaccctgccgacctcgcctataaagcgctggcggtcaacctgagcgacctggcggcaatgggcgctgaaccggcgtggctaaccctggccctgaccctgccggaagcggacgaagcctggcttgaggcctttagcgacagcctgttcgtgcagcttaattattacgatatgcagctcattggcggcgataccacgcgcggaccgctgtcgatgacgctgggtattcacggctatgtgccgacgggacgcgctttgaagcgctccggggcaaagcatggcgactggatttacgtcaccggcacgccgggagacagcgccgcgggtctggcgattttgcaggatcggctgcaggttgaagatgacgccgacgcggattatctcctggcgcgccatctgcgtccgctgccgcgggttctgcaggggcaggcgctgcgcgatttggcgaacgccgccatcgatctctccgacggcctgatttctgacctggggcatattctcaaggccagcggctgcggcgcgcgcgtcgatcttgatgcgatgccgttctcggatgccatgctgcgccaggttgagcctgagcaggcgctgcgctgggcgctctccggcggtgaagattacgagctgtgctttaccgtacctgaactcaatcgcggggcgctggacgtggcccttgccaacctcggcgcgcgttttacctgcattgggcagatcctgccggaatcggaaggtctccagttcacgcgcgaaggtaagcccgtcacgttcgattttaagggatacgatcattttggcgcgtagtagagatgtggcgaaaagccgcctgaagatgagcaacccctggcatctgctggcaacgggatttggcagcggccttagccccgtggttcccggcactatgggatcgctggcgtcgatccccttctggtatttgctgaccttactcccctggcagctctattcgctggcggtgatgatgagcatctgcattggcgtctatatttgccaccgtacggcgaaagatatgggtacccacgatcatggcagcattgtctgggatgagtttgtcgggatgtggatcaccctgatggctctaccgacgatggactggcagtgggtcgccgccggatttgtgattttccgcctctttgatatgtggaagccgtggcccattcgctggttcgaccgtaatatccacggcggaatggggatcatggtggacgatattgtcgccggggtgatttccgccggggtgctgtacgtgattggccaccactggccgattggtcttttctaaacactgtccgggcggctggcctcgcgcccctgggaaatggatcaggcaggcttttcccggaggcggtgctgcgcacctgtccgggctaccggcccgcaggcgttggtgagtcagtcgcccgggcagacgctttgcgtcgcccccggaagcagaacctgtagcccggctaagcgcagcgcgagccgggaatcggcagggaaccgcgcgttacttgaaccccacaatcgggtgcggtttatacggcgtctccagcttttcaatctgatccggcgtcagcgttaaatcgaccgcatgcagcagctcatccagctgctcctgccttgaggcgccgataatcggcgcggccacgcccggcttgctcaatagccaggccagcgccacctgcgcgcggttggcgtcaagctcttccgcgacttcggccaggtttgtcgcgatcagttcatcattctcatcagtggcattgtagagcgccttaccgacttcatcggataccagacgggcggtggtttccccccacggacgggtcaggcgaccgcgcgccagcggactccacggcatcaccgcgacgccttcacggctgcacagcggcagcatttcgttttcttcttcacgataaatcagattgtagtgatcctgcatggtgacgaagcgggcccagttattctgccgctgtagcgctaacgcctgggcaaactgacgggcatgcattgacgatgcgccgatatagcgggctttacccgccttgacgacgtcgttgagcgcttcgagagtttcttcaatgggcgtggtgtaatcccagcgatggatttgcagcagatcgacatactccatgccgaggcggcgcaggctgtcgtcaatggatcgcaggatctgcgcgcgcgacagtccctgcggcagatcgcccacctgatggtaaaccttagtggcgacgatcacggaatcgcgacgagcatactcacgcagcgcgcgcccgaggatctcttcgctgctgccgtcagagtagttattcgaggtgtcgaagaagttaatgccgccctcgagggcgtattttatcagcgggcggctgctctcttccggtaaggtccatgcatggttaccgcgatccggttcgccaaaggtcatacagccgaggcagagtcgggaaacgcggagatcggtatcgccaagagggatatagtgcatagtgcgctcctgctacgggtaaagggtatcctttaagcatagcaggagcggtggcggcaattatgccagccaggcgtggattttggcttctattccggcggcgtccaggccgaggtcggcgtgcgcttcttcctgggttccctgcgggataaagaaatcaggcaggccgagattgagcacaggaaccgcgcggcggcgggacatcagcagctcattcacgccgctgcccgcaccgcccataatggcgttctcttccagggtgaccagcacttcgtgttctgcggccagctgtagcaccagcgcttcatccagcggtttggcaaagcgcatatccaccagggtggcgttaagcttttccgcgacttttgccgcctgcggcagcagcgtgccgaagttcagaatcgcgattttttcaccttcgcgtttcaccacgcctttcccgataggcagcgaggccagcggttcaaacgcggcgccggtaccggagccgcgcggatagcgcaccgcgctcgggccgtcgttgtagtgataaccggtatacagcatctggcggcactcgttctcatcgctgggggtcatgatgaccatgtcaggaatgcagcgcaggaaggagatatcaaacgcgccctgatgggtttgtccatcggcgccgacgatacccgcacggtcgatagcgaacagcaccggcagcttctggatggcgacatcgtgaatcacctgatcgtaggcgcgctgcaggaaggtggagtagatcgccaccaccggcttatagccgccgatcgccaggccggcggcaaaggtcaccgcgtgctgctcggcaatggccacgtcgaaatactggtcggggtattttttcgagaactcgaccatcccggaaccttcgcgcatcgctggcgtgacggccatcagcttgtcatctttcgcggcggtttcgcacagccagtcgccaaagattttcgagtaagagggcaggccgccgctgcttttcggcagcacgccgctggtgtgatcgaattttggcaccgcgtggaaggtgatcgggtctttttcggcgggctcatagccgcggccttttttggtcataatatgcaggaactgcggccctttcaggtcgcgcatattcttcagcgtatttaccagaccgataacatcatgaccgtccaccggcccaatgtagttaaagcccagctcttcaaacagggtccccggaaccaccatccctttgatatgttcctcggtgcgtttgagcagctctttaatcggcggcacgccagagaagacctttttgccgccttcgcgcagcgtggagtagagtttgccggagagcagctgcgccagatgattgtttagcgcgccgacgttctcggagatcgacatttcgttgtcgttgagcaccaccagcagatcgggtttgatatcgccagcgtggttcatcgcttcaaacgccatcccggcggttatcgccccgtcgccgattacgcaaaccgcgcggcgctgcttatcctctttggctgcggcgatagctatgccgattccggcagagatggaggtcgacgagtggccgacgctcaggacgtcatactcgctttctccgcgccacgggaaggggtgcagcccgcctttctggcggatggtgccgatccgatcgcggcgtccggtcagaattttatgcgggtaagcctggtggccgacgtcccagattaggcgatcgaaaggcgtgttgtagacgtagtgcagcgccacggttagttctaccgtaccgagcccggaggcaaagtgtccgctggagcggctgacgctgtccagcagataacgccgcagttcgtcgcacagtttcggcaggctatctttcggcaacaaacgcaactcctgggtggaatccaccagcgccagggtcgggtatttggcaatatcaaaactcatcagagactcatttattgtttatttatcacgctgaattatgtaattcgcgagcgcttccagtgccgtggtatccagagattgcgcggccagctcagttaacgaccggcgggcgtcggtaatcaggtcaaaggcctttttccgggcttgctcgagtcccaaaagggcggggtaggtacttttgcccagctgctggtcggctccctgacgtttgccaagtgtggcagtatcccctaccacgtcgagaatgtcatcctggacctggaaggcgagaccgatgttctcggcgtagcgatcgagagcgggtagcgccctgcgtccggcttcacctgcgctcagcgcgcccattcgtaccgcggcgcgaatcaacgcgccggtcttatggcggtgaattcgctccagcgacgtcagatcaacctgatggccttccgcttccagatccagcgcctgaccgccgcacatacccgcgatgccgctggcctgggccagctcagaaatcatcgccaggcgatcgcgatccggcacttccggcatcggcgcatcactcagtatagaaaacgccagcgtttgtagggcgtctccggcaagaattgcgttcgcttcgccgaattttatatggcaggtcggctggccgcggcgtaaatcgtcatcgtccatcgccgggagatcatcgtgcatcagcgaataggcatggatgcattcgacggcggcggcaggggcatccagcgtagcgcggctaacgccaaacatatcgccggtcgcgtaaaccaggaacgggcgcaggcgtttgccgcctaatagtgcgccatactgcatggcttcgaccagcggagtgttctgaaagggctgcggagcgataaaacggcgcagcgcttcgttagcctgctcgacgcacgcctgtagctgttgcgggaagtccatttattcagcgtccggcgtaaaaggggtaagcggcgcgtcttcgctatccgccagcagaatttgtacgcgctgttcggcctgctgcagctttgcctgcccctggcgcgccagctggatcccgcgctcgaattcgccgagcgcttcttctaacggcagcgagccgctttccagacgattaacaatttgctccagctcgcccagggcggtttcaaagctggccggggcctcatttttctttggcatagtgaatatagactcttgtaatgtctcgatggctatcaatatggtaacgaagtcgcgcggttaatcaaataacgcgcaatgccaggtgaaaagcgtccaatagtggtatactccgcgccctggatgcagacgccagtcgcgcctgtacaactttttatgcttaaagccccgtcgggcttgccaacgaatagtgtcgccatgaagtttatcattaaattgttcccggaaatcaccatcaaaagccaatctgtgcgattgcgcttcattaaaattttaaccgggaacattcgtaacgttctcaaaaactatgatgagacgcttgccgtcgttcgtcactgggatcatatcgaggtccgggcgaaggatgaaaaccagcgtccggctattcgcgatgccctgacccgtatccccggtatccaccatattctggaagtcgaagacgttccttatacctctctgcacgatattttcgagcagacgctgccgctgtggcgtgacgcgctggaaggtaaaacgttctgcgtgcgcgttaagcgtcgcggtaagcatgagtttacctcaatcgaagtggagcgctacgtcggcggcggtttgaaccagcatattgaaacggcgcgagtgaagctgaccgaccccgatgtgacggttaacctcgagatcgaaaacgatcgcctgctgctggttaaagggcgctacgaaggtatcggcggtttcccgatcggcacccaggaagacgtgctgtcgctcatttccggcggtttcgactccggcgtttccagctatatgctgatgcgccgcggctgccgcgtgcattactgcttctttaacctcggcggcgcggcccatgaaatcggcgtgcgtcaggtcgcgcactatctgtggaaccgcttcggcagctcacaccgcgtgcgcttcgtggcgattaacttcgagccggtggtgggtgagatcctggagaaagtcgacgacggtcagatgggcgtggtgctcaagcggatgatggtgcgcgcggcgtcaaaagtcgccgagcgctacggcgtccaggcgctggtcaccggcgaggcgttaggccaggtttccagccagacgctgaccaacctgcgcctgatcgacaacgtctcggatacgctgattctgcgtccgctgatttcgcacgataaagagcacattattgacctcgcgcgtgaaatcggcaccgaagattttgcccgcaccatgccggaatactgcggcgttatctcgaagagccccaccgtgaaagcggtgaaggcgaagatcgaggcggaagaagagcacttcgatttcagcatccttgagaaagtggtggcggaagcgagcaacattgatatccgcgatatcgctcagcagaccgagcaggacgtagtggaagtggaaaccgtcagcggttttggccctgacgacgcgatcctcgatatccgctctatcgacgagcaggacgataagccgctgaaggtggaaggcgtggacgtggtttctctgccgttctataagctgagcaccaaatttggcgatctcgaccagagtaaaacttggctgctgtggtgcgagcgtggggtgatgagccgcctgcaggcgctgtatctgcgcgagcagggctttgaaaacgtgaaggtatatcgcccctagttcttcaggagcaaggcgcaatcatgaaaacggcaaccctgggttgccgttttgcatttattcgtagtagttataaattcctgccgccatcaccagctgtgaagcgacttcgtgcgctttttcgcgtccaaccagcaggtcgatcatcttcaaggcgaaatcaattgaggttcccggcccctggctggtgagcagcttaacgcgagcgtcccagacgacgcgcttatcctgccactgctcggcgggaatgcgttctttcagcgccggaaagccggtcatattgccgatggggaaaaggttgtgcggcaccagcacggtcggcgccgcggcgcaaatcgccgcaacgatacgcccggaaagatggaattgacgtactgtttcaaccagcagcgggctgtcgcgaaagcactctgcacccttaatgccgccgggcagaacaaggatatcgaaatcgccatcggccacttcgaccagcggcgcatcggccagcagcttaacgccgcgcgagcagacaatggtcaggctgccatcgctggcaacgctggcggtcgtgacctttacgcctccgcgaacgagtaaatccatggtggtgaccgcttcggtctcttcgctaccaggggcgaggcaaatcagtgccgacgcgctcatattcattctccttacgctttaccagttcaaacaggcgggtattctcaggtacggcgataccgtgggctcgggcgcgttttaacagataaccggtgatatagtcgatttccgtatggcgctgggcgagaatatcctgcagcatggaggaggtattttctgccgtactttcaataacctgatgtacatagaataacaggttttccggcgaggtatgcatcccctcgcgatccatcaccgccgcaacttcataacaaatcgcggcgacctcctgcgggtattcgcgtaaatcgccgttctgacagttttttaacgccgtcagcgggttaatcacacagtttaccgccagcttgctccaggtcgcggggtagatattgttatgccaggcgacgtcgggcagcacgctctgcagtacatcggcgagatagctataatcctcaggataggctttcgccgggccaatatggctggtgccgttggcgacgtggacgatcacgttgccgtcgcggcgggccgcctgcgttgtcgaagccagaagcagcggctgtttgaggcttttaagctcgtcaacggtacccataccgttgtgcatgagcagaacaggtactgacgacggcaggatggcgctcaggttttttaccgcgttagagacctgccaggctttgagggtgaccagcagcaggtcgctgctggcgagaaaatcaggatcgttagcggtaaacgattcattaaacacgctgccgtcggtttcaatcacattgacgctacagaatggctgtgggacgcgtaaccagccctggacttcatgtccgtgtttgtacagcgcagttagccataactgtcccagtgcaccgcatccgagtacggttactttcattattcctcctcacctgtgagtgctgcatcaggtgctcatggctaaagtatagcgttatcagttatcctttcgggataacaagttgagttatgtcgcgttgcgggtattatgcaacgcaaaagaaactgaaggagaggaaaagatgccatctttcgatattgtctctgaagtcgatcttcaggaagttcgaaacgccgtagagaacgcgacccgcgaagttgaatcgcgttttgatttccgtaacgtcgaagcgagctttgagctgaacgaaaaaaacgagaccatcaaggtcctcagcgagtctgatttccagattaaccagctgttggatattctgcgcgccaagctgctgaaacgcggaattgagggcagttctatcgaagtgccggacgagttcgtgcacagcggtaaaacctggtttgtcgatgcgaagctgaagcagggcattgagagcgcgacgcagaaaaaaatcgtcaagctgattaaagacagcaagctgaaagtacaggcacagatccagggcgaagagattcgcgttaccggtaaatctcgcgacgacctgcaggcggttatggcgctggtgcgcggcggtgatttaggtcagccgttccagttcaaaaacttccgcgattaaaagagtcccgtctgtcggccgggctcggcgttagccgccgcccggcaggacacaaagcaccgctcagaaccgtttttgcctgcctgaacaaaggtgctcgcttttatatccctttgattgcctgctcaatttcaaagcggttagtgatcttgctgtcgattttgatatacaccgaacgctcttcgctaatcaccagcacctctttgacgccctctttagcccgtaagcgcgcttcgagcattttgtccgcggcgatatcctccgggatttcgacccgcaggctgctaacgtagggcggctcgctcatggtgctggccaccagcagccacagcatcgccagcagggcgccgagcaggaagacggtttgcgaatcaaaaaagccatccacccagccgccgagcgctccgccgatggccacgccaaggaactggctggtggagtaaatgcccatcgcggtgcctttatatccggccggtgattctttgctgatcaacgacggcagcagcgcttccagcaggttaaacgcgaggaaaaatagctgaacgccggcgaccagctcccagaaatagcctccggcaccccagagtacgatttcagcaatcagcaggatggcgacgcacagcaggaagacgcgcttcattttgcgcttcacttcggcgtagataataaacggcaccaccgcgacaaatgagaccagcatggtgaccagatagattttccagtgctcggcggcggggaaaccggcggcctcaagctggcccggcagagcgacaaacgtggacatcagcatgatatgcaggcacataatgccgaaattgagcttcaggagttttggctcggcaagaactttgctgaagcagcctttcaccataccggactcgcggttcagcacgtgattctggctgttcggcacaacccatagcgtcagcaggatgccgagcgtcgccaggagagcaatcatccagaacagggcgtgcaggccgagttggtgggtaacgacaggcccgagaaccatagcgatagcaaaggtgacgccaaagctgacgccgataaacgccatggctttagtgcggttttgctcgcgggttaaatcggaaagcagcgccatgaccgcagcggcaatcgccccggagccctgcagcgcgcggccaagaataatgccccagatagagtcagaaagcgcggcgataacgctgccgacaacgaagattaacaggccgccgacgatcagcggcttacggccaatgcggtcagaaagcagcccgaaaggtatctggaatagcgcctgggccagcccgtaaattccaattgccagtccgataagggcttcgcttgcgccctgtaacgccatgccgtaagtggtcagaaccggcaggaccataaacatgccaagcatgcgcaaagagaatacggtccccaaaccccaggtcgcacgcagttcgcctggcgtcattttattatcgttcattaccacctcaatataaaaactgcgcatagtgtagtggggggaaacagaagcgtaaataaatgtttgtttaacagatattacgactgtgttgcatgatgaggtgagtacggtagaaagaaaaaaccagtggaggggcctccactggtgttcagcggttattggcagttaaagtcaacccactggccgcctgcgtcggcggatttgacgcactgctcaacccagtaaacgccgtgaagaccggcttcgacgtccggataccagaaggtctccaggaacgcctggtccccgcgatccatcgcgtcgatggcgatagcgtagcggcgatagaggttggcccacgcctcgaacagcccttcagggtgaccgccgccaatgcggtcgtccgccagcgcctgctggctgagatagggcatcccgcgctcgaggacgcgggccggttcgccctgtacctcgtagctgagctgatttggacgctcatcccaccattcgatgctggctttttcgccaataacgcggactttttgcgagtgcatcgcgccgctgttgaccgcgctggtccacagtgagccaacggcgccgttgttatattccatcagcacaaaggcgttatcttccagcggcgcgcgagatttgacgaagctttgacgcgcgcacatcaggcgggtgatgttcaggttcggcaccatcgtctcggcaataaatagcgggtgggttgccagatcccccagcacatagctagggccggcatatttgggcgttacccgccagcgggtggattcagcctgcagctcaacggcttcattatgaaaaccgtgggcgaactgcatattaataatgcggatctcgccgagcttcccttccgctatcatctgccgcgcctgctggatcatctggtgtccggcataaccgtacgtgacgccgataattttattctgctttttgcttagcgccagcagctcgcgcgcttcgtcggcggtaaagcacagcggtttttcgcaaatcacgtgcagcccggcttcaagcgccgctttagtgatagcgaagtgagtattgttcggcgtagtgaccgatacggcttcaatgccgtcagggcgtttggcctcctccgcgaacagcgtttggtaatcggcgtagcagcgttcaggagcgatgccgagctgctcgccgaattgacgaccgcgctcggcatcgatatcaagcgcgccggcgagcagagtaaagacgttgtcgcgaagcgccgcacagcggtggctgtagccaatctggctggtgccgccgccgccgaccatgccccagcgcagggagcgggataagggtttcatgccgtttaacatgatggtgcactcctcaatgatagagatcctacggatttcagatgttcttctgtgtacccgcgctcgccgagcgcgggcctggttctaaggttttacatctcgccacgggcttcgcgttctttcaggtcatgcatgatctgcgggtattgcttatccaggcgataaaacagcagggtgataatgaccacgatccacaggaagaaagagccgtagagataaacgtggttaatcatgtcgatagcgctttgcggctgaacgccggatccgctgctggagctgacgtaacccgccatgctcagcaggcccgagataaccgcggcggcaatacctgcgccgagtttcgtcccaacggaaccggcggagaagatcatcccttcctgtctgacgcgcgttttccactggccgaattcgacggcatcgccgcagaagccgaacagcacggcgttcagcggggcgaagccaataccgcgaataatcgcgtttgccagcgcccagtggtaatcatcagagttaaacataaacagcacctggccgatggtcgccagcacgatgccgcagagggcaacgttgcgtttaccgtatttgcggatgggcacggagctcaggaaggtgaaaataataatgcaggcggtttcggcaacgaaaatggagctatagaaggtatcgtcaccgagcacgtagcggcagtagtaaggcagcgcgatccctaccacggtgtagtacacgctttgcgcggtccacaggatggcgctggcccagaagtactggttacgaaaaagcgcggaaagctgggtttttaccggtacgtttccctgtttctctcgcgctttgatgaccaccttctcttcgcatttataaaagcaaaacagcagcaacagcagcgccagaaaagcccaaatagacatggttttgatccacgccgcctgatcgtcgccaaagtacttcaccagcggcaatgtgcaggcaacggcgagaatacgaccaaaaggcgacatcgacattcgggtgatgctgagcatatccctttcccatgaggcgcgggtcatcatcgcagagaggctgccgtaggggaggttgatggcggtatagcacacggtggtgcagaagttataggcgaccagcagatagagaaactgcagcgtgccggtggtctgcgggacggtgaacagtaaaattgccgatacggcgtagggtacgctcatccacagcagccagggtcgtgatttaccccagcgagagttcgtgcgttccaccatcaggcccatgatgacatcggaaacgccgtcaaacagacgtgagatcagcatcaccaggccaacggtggcgatgctgatgccgacatagtcggtataaaacagggttaaaaccgtgccgatcatgccgaaaacgacgttacaggcggtatcgccgccgccgtaagcgattcgggtagcccagcttagcttatcgccgcgtgctgccgcgggagagagaagaatctgctgttcactcatggtcaattcctttgtctggaaggacaagtcaggacctctgcgccagttccaccggcacgaccttatcctgaatatcagccagaacataaggaaatatttatttcatttcaatgcttgtttggaatttaatttctgtatatgcgaggcggatcgaaaaaccgtaaaaattgagccgtaaattttttggctacagctatcaagtcattctgattgataaggttattaagtgtttttctggacgatgtttgatttgtttattgtatggatttaatgattttgcgctgtgattttgtgaagtgaatcgatactgcatggcatttttatttttcattgttcatttaaatgaaattaattttctttttttggcaggcgtgtttttgaaacacgcccgccttagcgtcaacgtttaaaatgtacttctgacgggcgcggttgacgcggtggcccttgccgtcgggccagccgcgaaaatacctttggccgccagcccggcgacggttatcgcggcgggaatgccaaggatcaggaaaacgctttcgaagctgatattcagcgccagcatctccgccccggcaaaggcgctcaggatcgcgcccatgcggccaacgccgtgcatccagctggagccggtagcccgtgcttcggtaggatagtagcgggcggagagcgcgttcatgccggtattggcgccgtttaagcaggctccgctgataaatgccagcaggcagatgagcgcaaagcttgccgcggcatagcccatcgccatcgtaaacaggccgccaaccgcgtaaatcagcccgagcgcccgatgtgggttgatccggtccattagccagcccgcaaacagcgagccaagggttcctcccgcctggtacattgcggtcattaccgccgcctggccgaccgttaagcccacctcttttaccagcgtcggtagccagctgccgaggaggtaaaccaaaaaaaggcccataaagtaaaccagccagagcatcatcgaaccgaagcgatactggcgggagagaacgatgcgcatggcatttgcctggacgggctgggccgggaggctgaactcggcctcatcggggatttgtcccggatagaggcgctgcataatccgccgaatacgttcggcaggcgcgcgcttaacgaccagaaaacgcaccgattccggtaacagccagatcaggaccggagcgaacagcagcgggaggatcccgccaagcagcatcagcgagtgccagccaaactgcgggattagccaggatgcggagaaaccgcccgccgccgcgccaaaggtgaagccgcaaaaaataattgtaatcaggaacgagcgctggcgctccggcgcatactctgacaccagggtgccgatattcggcatggcggcgcctaatcccagcccggtcaggaagcggaaaaccatcatctgctcaatattttgtgaaagggcggttgcgatggtccagaagccgaagaagaagacgctattaatgataatttttttccgtcccagccagtcggcgagcggcccggagaaaatggcccccagcgccaggcctatcagcgcggcgctgatgacaaaaccgagttggtgattgcttactccccattcctgcttcagcgtcggggcgataaaacccatgatggcgatatcaaagccgtccagcgcgataacgcagaagcctaaaaacaccaccagcttctgaaagcggcttagcggattggcgttgattaactccctgacgtccaggcgttgagtctgtgtcatgggactctccttatgcgcaagggcgcaggtaggactgcgcggcgttaaacagcagttgagcgcgagcgagcgccggtagcgcaccccgagcgccgcttaacgggacctcgatggataccggcagcgtggccggaagcgccgccatcagaccgtgcaggtcgagtccgccttcgccggggacctggcgcgcggcgcgggcctggtaaatcagctcctgctcgtcagcggggggttgcggtaaggcatcgcaaagctgcatatagttgaggcaattttgcggtagcgccgcgatcgtggacagggattcgccggcccgccagaagtgaatagcgtcaatcaaaataccgatatcgctgcggccgctggcgttgatgagcgcccgggcttcggcaatggtgcgcaggtgggtccagggcatgggctccaggttcatggttaatccatacgcctggccggcttcggcaagacgagcgagattttctgcgctgcgcgtcctgttttcatcgtttccggcgactaaaacctgctttgcgccaaggcgcgcggcggtcgtcagaaaaagctgcaaacgagcgtccaatgaaaaatctgccgtcaggcggacgatctcaacgtccgaaacgcgaacgccggtttccatcagcgccgccagggtatcgcgtacggcggcggtgtcgccgagcatgtcgtaatccggatctgatggggttgcgggaagcaggcgcagaccaacgtgggtgaatccggtctgggccgcaatgcgtacctgttccggcggcggaacgtcgaggagggtaagcgcggcgagtgagagggttcgcatgttcataaaggactccagtacagttgcaggtgattgttgttatgcgtattgccgtccctggtggaatgcttttactgtgttgttttattgagattttctgccaggttttttccgaccagatagccaaaagtcatggccgggcccagcgtgataccgccgctgggatagaatccccgcatcacgctcgacatatcgttgccgatggcgaaaagcccctggatcggctgccgctgggcgttgagaacacgggcattttcatcggtgattaatccactgaaggaacccagcgagccgggcaatatgcgtaccgcataaaaaggcccatggctgagtttcccgagcgtggggtggggcgagcggctggcgtcaccctgcgcgcggttataggccgaggcgccgcgccgaaaatccttatcctctccctggtctacaaagccgttaaatcgggcgatcgtttccgttagctgctgcggattgatggcgcatgttttcgccagcgcttccggcgtctcacccacgtacagatagccggtccgtcgccaggcctcgggggtaaacgggaaggggcgagcatggcccaacccgtagcgccgcagcgcacggccgtcggcaattagccacgcctgcggcgtttcgcccggcggcgtcgcgtccagcagtgcggcaataaaatcatgataagagtcggcctcattggtgaagcgtttaccgttgggcaacacggcgataaagccgggcttggcgcgctcaaccagatgcgggaacggcagctgcagcccgctggcgagggtaacgcgcgacaccggcgcccaggccatggcgtgcctgagtgaggtatcaaactggccgccgaccgcttcgccgagccgaatgccatccccctgattgcccgggggcgcggcggagaagtggccgtagccgctggcggcgtgcggcacattttcggccagacgctgcctgtcgtgaggaaagcctccgcaggcgaggatcaccgcgcaggcgcgaacctccagcgcgccgccgtcgctgcgtaatatcgcgccagcaacgccgttgttgtcggtaagcagacgttctaccggcgcgttaagctgaaaattaacccccgcatccagcgccgaacgcagcaggcgggcgaccagcgcgttgccgttaaccagatgctgtccgcgaccggcgcgcagccgctgccagccgtgacgcagcaggcggcgggtcgcatacagcgccgagcccggtgagcgggtcgcgttgaaaaagtgcgccatgtccgtgccgccggcaatgcccatacccgcaaggctgatggtctccagcggaggccgcaggcgatgcagccagtcgcccagcagccgtccgtcaaaaggctgcgccgtgaccgagcggccgcccagcgcagcgcccggtgaagcgtgaaaatcgggcattttgctgccggaaagaaactgcacggcggtacggcggcggaaaaagtcgatcatctccggtccgtactgtaagaaggtaagcagacgcgcatcggcaggctcaccgtccatttcatggcgtaaataagcgagcggcgcgcccggctcttcttcaatcccttcttcacgagccagcgggttacgcgggatccacagccagccgccggaccaggcgctggtgccgccaatgaccgactctttctccgcaaccagtacgctggcgccgccgagcgcggcggtgacggcggcagagagccccgccgcgccggagccgacgaccagaacatccacgttcatctgcccgctcatgaccctctccttattgcagtggtgaaaaatcagtggggcgcagaagcaccgactccaggcgctcgacggcggccagctcgcggtttttgcgcgagaacgtcagccagcgttcgtcctgcgtcatgcgcgcccgacgcgccaggcgatcgtccagactttcataggcccagatatgcaccacctgattgaccacgccaatttcggtaaagaagaagccgatgagcttaccgaggtgctcggtttgcacggcgtaagcatcgcttttgtacagcgccagccagtcggccattttcagcggattgatggtgtaggtgcgtttttcatagatcatgattttctcctgtttatagtgcgtgttgttgcgccatatggctggctgagagatagccgaaggtgagcgccggaccgagcgtaatacctgggccggggtaggttccggccatcatcgaatccatatcattacccacggcatagaggcctttgatcggctcaccgtgctggttaatgacctgagcatcggcggtagtgaccaggccgcgcgaggtaccgagatcgccggtatagagggtgacggcataaaacggcgcgcgggtcagcggagcgttacaggcgtttggccggtggccggggtcgcccatcgcgcggttatagctgttgccgcctttggtgaacgccggatcgaggccctgagcggcatcgcggttgtagcgtgccaccgtgtcagcgagcgtctgcggatccaggccgagccgctgcgccagttcaggcagcgtatcggccttatgcagatagcccgctttcaccagcgcgtcgttattgaccggggcagggcgcgccaggccgaggccgtagcgcttcatggccagggcgtcgcaaatcagaaagcagggcgcattttctgcccggctttgcatggcgctggcgaagtggtgataagagttagattcgttcacgaagcgcaccgcgcgctggttgacggcaatcaccccgggtttggcgcgatcggtgaccaggtgagggaagcgctcttgcgtgccgtcgggatgctgtaaaaccgagaccggcgcccagaaaaagttagacggcaggtcagccccttcccgggcattgaccgcggcggcaaggcgcagcgcggcgccgtcgttggcggcgggggacatggtgtagtgctcgcgggtctgggggcgatagcgttcagccagcctgcctgcggcaaaaccacccgccgccagtaccaccccgcagcgggcttcaagagcctgcttttgaccctcgcgctcaattactacaccggtcacctcgccattgcgttcgctcagcgaaagcacgttgacgttgagcctgagctgcatacctttgcgaaaggcgagcgtcgccatgcgggcgatcagcgcgttgcccatcgccaggcgggtaccgcgagggtaccgcaggcgatcgcgaccgaagcgcagcagcagtctgcagcagtgcgcgaacgagcgcggggagcggcgcatatcgagaaagtgctggatatcaacccggttaaccatcatcccgccaaacagcagcattcccggtgggggagagcggaggtcgcgaaaatgcgcacccagttcccgtccgtcaaactccaccacctccagcgcccgcccgacatcgacggcgccgggctcatccgggtaataatccggagagagcgggcgcaggctatatttcaccgcaccctctttttcaagaaacgccagcgcctcgcgccctgaagcgataaaggcatccaccagatcctgacgataatgaggctcaccgataatcgtccgcagataggtttcgatggcctgcgggctgccgcccacggccattttccgcgcctgatcgctatcgtggatccacaccgcgccgccggaaatggcggaggtgccgccaaactgcggggctttttccagcatcagcaccgacagtcccttacagctggcggtcaccgccgcggcaaagcctgcggcgccgctgccgataacgatgacatcccagcttttcatgccgccgctccttgttcctgcgcaatggcgccgatgaattgccccatcagtttcatctgcgccagcgccatctccggcccggtctggatcgcgcagccgcgatcccgggcgaaggcgaggagcggggtgatgatcggggcggtcaccacgtcggcgacatgcgtggatagcggaagggtttccagcagcgactgcggcagcggcaacggctcgaaaccggccattcccgccggggaaccattcaccagcaaatccaggccggcaagcgtagcgggcaggtcgacgagatgaacgtgcggaaaatgggtggccagccggttatgcagcagctgaagggtggcgggattctgatcataaagggccaactggcggatgcccgcttcgcaaagcccccacgcgatagcgctgccgacgccgccgcagccggagagcagcccctttttaccgccggcgctaaagccgtgcgcctctgcggcaagctgaaaaccgacgccgtcgagcatatcgccctgtaaacggccatcggccagcttacggatgacgttaatggcattaaggtgctgagctcgcggggataactcgtcgaccagggcggcggcccgctgtttgtgcggaacggtgaccaggacgccgctcatgttgtgccagccgcgcagggcctgcagaaagtcagcaacggcttcgggggcgatatcaaccgggatcatgacgctgtccatctgctggtcagcaaagaagcggttgaaattctccggcgacttaacctgggtaatcgggtggccgatgacggcgacgacctgagtgaatccactgaccatttcaaacctcattttgttaaatgaatgttgtgaaagtatttcagcggaagctgagagcgacaacgcagaattcggccatactggttgttaatcgcactaccactgcgataatcgcgctaaactgattgtattgttgcgaaagtgtgaacaagtatgcaaaaccagattcatacccgcgatctgatcgtcggcctgcaaaaagggctggcgctgatccagctattttcaaaagagttcccccggctcaccgtgccgcaggcggcgaaaatgagcggcctgacgcaaagcgccgcgcggcgctttttccttaccctgctgcatgagcgctatctgcaaaccgacggacgccattactggctaacgcctaaagcgttaaggctggggcaggcgtatgtcgattcggcgcagttcccacgcatggtacgaccgatcgtggagtacatcgccagccggacggaagagcacgcttcggtcggcgtgatcgatgatgatgagctggtgtatatcgcccgcagtaaacacacgccgtttaactcgacttcagtgcgtctgggggagagagtgccgatttactgtactgccggagggcgactatggctggcttcgttagaggaagccgagtgtgaaaccgttttgcagcggatccgccgcgagcagcgtacgccctatacggtgacggacgtggcggcgttaatggaaaagatcgctcaggttcgtcgccagggatacgccgcgattgagcaggagtttgaaattggcatgctggtcctggccgtgccgctgtcagatcgggaagggctatactggggagcgctgagtttaaccagccatcagtcaagaacctcgattgaggcactatgccgcgatcatctggatttgctctatagcgctcaggcgatgctggtgggttaaaaccagaggcgcagacgattctctcatcttcgtgccgagagggcttacggtaggcaaaaaaagggcaggaagaatcctgccccgggaatgactaaccgatattaggcggtgatgctgttagtgaaagtgttccactcgcccgacaggttgtgcacagcattgctccagttctcattgcttgcggcaacgtagttctcccagtcagatgcgccggtaaggaatttagcgaactcaacggtatcgttaacgatggcattggcgatagtggcacctgctgaggtaataaaatcgctcagatagtttccattatcaacaataaagctggtaatgctgttagcaaaaccgagcagattaaaaccaccagaaatagattccatttcgccaatagttaattctttcattggtattccttgttaagtctgattaattgttattagtggggctattacccacggaagaaatactaacacccttaaattaaattaatccagagtgttaatgtgtgaaatatttaatttcatacaaacttaataaaatgaagattatcttcagtgataacggcttgagtcatgagtgtgaattttttattcgggccggctggctttaatgtgaattggcgtgacagccgctataaagaagaatgcgctgagcgtggttaaagaggggagataagacagggtgttattttcccatttaaaactttaatattgtgcactatagatgctatatgaaccgggcagaacaatattcatggcaaaagagaggcagctcgcgcggggaaggggagggcaagagaacatcgccctggtgtcataccccacgttaatatgtttattttcgatttcacattcgcccaccgggaatgacggaagcgcagcccgctgagtaaacgagggcttaacaatgccttgttaacccggaatgacgccagcgttcgaagaaacaaaaagttcggggtatgtctcttctactatattgcgtacaataaattaatttagcgtatatattcagctaaaccactcagcgcggtagcgggattcatctctcaatagataccatcgctgtccgctatggacaaaccatgtttagcgatcatttgttaaacaaaaggctaattcatctaaataaacgataactgcaggataatgaatggctgctgattaatctgatgcagctattagtcaaaacgaattggcagtactgcgtgactattatcgcctcagtatggctaaacccgttccggcagtaagtggagaaaggcgtatccggaggagggtttttgatcgaggacgctgaggcggaatttagctacggacagagaaagcattgagagggcagggggcacaatctcagaataatagaaaggggaggagtgaatgattgaccactatcggcgatgagagattaacagggggaaataagtaatggcgtatcgcgcgatacgccattgagagatactatctgaccatggtcagcaggttgtgtgaatccggcaccataaagtcgacggacatcatcaccgacagcgcggtaatggccacgatggaaaagacgaacagcttacgcgcccagactttatcatccgccactttataaccgcgcagcgccattccgagccaccagacgctcaccgccgcagcgacaaccagatatttatatccagcgtagccgcccagggagagcatcagcgtggcaacggcgaaagcgatgatgtaaacggtgatatggtttttcgccaccgaaatgcctttcactaccggcagcaccggaatattcgctgcctgataatccttgaagcggaaaatcgcgatagcgtaagagtgaggcatctgccacaggctgaaaatcgccagcaaaattgcggcaccgctgtcaaaatcaccggtaaccgcgcagtagccaatcaccggcggcgcagcgccggagagagaaccaatcagcgtgccgtagacggagtggcgcttcatgtacaggctgtaaacgccgacataaaccacgaaccccatcacccccagccagcaggccaggggattcgcgccaaaccacaggagcatgaagccagcaatacccagcagggtggcgtataccagcgaagcttctggcgagatcagccctttgaccagcacccggtttttcgtccgttccatcttacgatcgatatcacggtcgatatagttgttgaaaacacaacccgaggcgaccaccagggatactccgaggagcgtccagataaaaagcggatagtcgatgtggcccttggaggccagcaggaaaccgccaatcacggagatcaggttgccaaaaataatgcctggtttcgttacttgcaggtattgcttaaacatactcgccgctcttagtgcatcatcatgttgtagttcaggttccacataatccagatggagccgacaactacgatagcaatgatgattacggtgaagataaatgcggtcaggttccaaccttcgtccgatttactgttcatgtgcaggaagtacacgaggtgtaccacaatctgcacaaccgcagtaaccaggatggttcccagaatagccgcatgcgatgcagatccactcatcaccattgcaaacgggataaccgtcagaatgatcgacaggatgaaacctgtcatgtagctcttcacgctgccgtgagaagcgccgctatgatcggtagaatgactcattacatcgcccccatcagatatacaacagagaacacgcagatccacacgacgtccaggaagtgccagaacaggctcaggcacatgatacgggtgcggttagtgctggtcaggccgcgacgagaaacctgaaccatcagcaccgccatccagatcagaccagaggtcacgtgcagaccgtgggtgccgaccagcgcgaagaacgctgacaggaagccgctgcgatccgggcccataccttcaacaatcaggtgatggaattcatagagttccatcgcgatgaacccagccccgaagaggaaggtcagcgccagccaggaaaccacctggctcttgttgtttttgtacatggcgatagccgccatgccgtaggtgatggagctgaacagcagcagcgcggtttcaaccagaacgaacggcagttcaaaaatatctttaccggtcggaccgcccgccgtgccgttcaccagaacggcataggtagcgaacagagtggcgaagataatgcagtcgctcatcaggtagatccagaaaccgaataccttcatcggtcctgtatcatggtgcccgtgttcgtgcgcgtgggcgttatgcgcaagagtatcagttgccatttttcagccctgctttgttaatctcatcgaaatgctgattttccagtttttcgactactgcaaccggcacgtagtaatccacgtcctcgtcaaagctcttaataatccaggtcgccaggataccgacgaagcttgcaatcgccatccaccagatatgccagatcattgcgaaaccaaacaccgttgcgaaagcagcaataacgatgcccgcgccgctgtttttcggcatatgaatctcttcatagccagccggtttcttatacgcgtcgcctttttctttcatttcccagaacgcgtcacgctcgtgaacgacaggaacgatagcaaagttgtagaacggcggaggagaagaggttgcccactccagcgtacggccgccccacgggtcgccggtcaggtcacggttctgctcgcgatcgcggatagaaacgtagaactgaatcagctggcagagaataccgcaagcgatcagcgccgcaccgcaggctgcaacaaccagcatcgggtggaactgcgggtcaatctgctggctcaggcgacgggtcatgcccatgaagcccagtacgtacagcggcataaacgccacgaagaagccgatgatccagaaccagaaagcgcgtttgccccaggtttcgttcagggtgaagccaaaggctttcggccaccagtaggtcagacctgcgaagcaaccgaacaccacgccgccgatgatgacgttatggaagtgcgcgatcaggaacaggctgttgtgcagcacgaagtctgcgcccggtaccgccagcagtacgccggtcataccccctacggagaaggtcacgataaagccaatcgtccacagcattgctgagttgaagacgatacggccctggtacatggtaaacagccagttgaagatcttaaccccggtcgggatagcgatgatcatggtcgtaataccgaagaaggcgtttacgttcgcgcccgcacccatagtaaagaagtggtgcagccaaacgatgaacgacagaacggtaatacacactgttgcccataccagcgaggtgtagccaaacagacgcttacgcgagaaggttgcggcgatttcggagaagacaccgaataccggcagaaccagaatgtacacttccgggtgaccccaggcccaaatcaggttgatgtacatcatcatgttgccacccatatcgttggtaaagaaatgggtgcccaggtagcggtccagggtcagcagcgcgacggtgacggtcagaattgggaaggaggcgataatcaggatgttggcgcacagagatgcccagctaaacaccggcatcttgaacatggtcatgccaggggcacgcatcttgataatcgttacgaagaagttaataccggtgagcgttgtaccaataccggatagctggagagcccagatccagtaatcgaccccgacgcccggactgtactcaattcccgagagcggcggataggccagccaaccggtctgcgcgaattcaccgacgcccagagagaggttaaccagaatcacgcccacaacggtgaaccagaagctcaggttgttaaggaatgggaaggcaacgtcgcgcgcgccgatctgcagcggaaccaccaggttcatcagaccgataacaaacggcatcgctacgaagaagatcatgataacgccgtgggcggtaaagatctgatcgtagtggtgaggcggcaggaagcctgcttccccggccgaggccagcacctgctggctacgcatcataacggcgtcagcgaagccacgcagcaacatgacgattgctacgataacgtacatgataccgagacgtttgtggtcaaccgaagtcagccactcattccaaaggtaggaccacttaccgaagtaagtgatggccgccagaagcgccagtcccccaatgataattgcagccaccgtaaccacaataatgggttcatggtagggcactgcatccagtgtaagttttccgaacatcgttttcttcctcggccccttagtgagcggtttccgcgtggctcatgtccatgccttccattccttcgtgcgctgcgtgctcgccctcaggttgggtcatatccatgctcttaccgtgagacataaatttgttaataacatctttaaacaaatctggtttcacgttagagaagtattccactttgttgtattcgctaggcgcagccagtttgtcgaacgtttccatggagtccatggcgttcgcagactgtttggctttcgctacccactgatcgaaggttgcacgatccggcgtggcgatagctttgaacttcattcctgagaagcccgggccgctatagctggcggagataccgtcgtaagtaccagcttcgttcgcgatgaggtgcagctgagtctgcatcccggccattgcgtaaatctggctacctaaacgtgggataaagaacgagttcatcacggagttggaggtcactttaaagtgtaccggtacgttcgccgggaaggcgatttcgttgacggtagcaatgccttgttccggatagatgaagaaccatttccagtccatcgaaacgacttcgatagtgataggtttctcatcgtgagcaagcggtttgctcggctctaatgcgtgagtggttttccaggtcagaacggccaggaacaggatgatcaggataggaaccgtccagaccacagcttccactttgttggagtgtgaccagttcgggctatacttcgcatctttattgctcgcacgatacttccaggcaaatcctactgccatcaagacggctggaataacgacgatcatcatcaggccgaaggccgtcagaatcagagagcgttgctccagtccaatctgtccttttgggtcgaggagtgcagaatcacaaccactgagtaatacagtgcctgcgattaatgacatccatcccaaacttttattgtatttcctaagtctcattgaacgacctcaattccacggaatctggtggcgcttaaagtgtacgggcattttacgggaaggttgcattactgtaaacatagttggagctgtgtctgctctatgttagcggcttctgcttgccctgtcacatatgttacggagtgtgacattatcgcttgcaaaccttgatttaggcgggattgataacgaaagggataagaacgaaaggctttataagagaatgagcataactacccgcaaaacaacacaaataattaacaattaattatcaaataaaagacatcgtaaaagcggaaaataaaacctgcaaagctgaatcggttaaattatttaaagattcgcataaaaattgtcaataatttccagaaatctaaaacgcacaaaacaacaaatcggctacgatgaatataaaatcgttaataagacgttataattacgtttggtaattacaacgtccacgtacgtttctgcgctgatttaaatcagctcggttttacgtaatgccagatagtcaaggaaggcgccgagtaaaatacccgcaatggcggtgagcacagcgatctcaagcaggctggcaaggaaggagaaattggtgtaatccagcgcgttgagcgtcagcagcagcagccatatcgccagcatcaggcagccagcagccagaataatcaatgccagcccgtaggtttgtggaaagcgcgtgcggggcataaagctttctgagcgctgggtgtgttccagcgtacgccggcaaattaacagcagcacaatccccggtaccgcggcgacgacggaaaagagatagaaagtaggccagccgtgggcttcaacaaaccagccggcgatggggccaacatacacgcgcccaacggcagagagggctgagagcagggcaaactgggtggccgaaaacgatttattgcacagcgtcatcagcagcgcgacgaacgccgcggtgcccatcccgccgcacagattttcgaaaaacaccgccgtcgccatggagaaaaggtgcttatcggtaattgagagcagccaatatccggcgttggataccccctgcagcaggccgaaaatcagcagcgcgcggaacaacgtcaggcgctgcataagcacgccgccgtaaagcgcgccgacaatcgtggcgaacaggccgagcgttttattcaccattcccacttcacccgcatcgaaaccgacgccgcgaatcaggaacgtggtggtcaggctcatggcaaacgcgtcgccaagcttataaaggacaatcagcagcagaatgagccaggcattattgcggccgaagaagtcgcgcagcggtgcggcaacggcctgctccagcgttttcggcaccggaataacgtcgctgggttccggcgccagcagcgtggcgataatgcaggggatcagcagcgcggccatcagccagtacatcccttgccaacccagccagcgatcggccagccagagcgccagcccgccggagaccagcatccccagacgatagcccagcacgctgattgccgctccggtgccccgctcttccgcggccagcacgtcagttttccacgcgtcaaacacgatatcctgcgaggcggaacaaaaggcgatgaccaccgccagcgccgccatccagcgcagctgcgtggacggttcaaggaaacccatcgccgcaatggcgataaggagcagaaactgggtcgccagcagccagccgcgacgacggccgagaaacggcggcgtatagcggtccatcaccggcgaccagaggaacttaaagacgtaggcctggccgacgagcgagaaaaaaccgatagttttcagatcgatgttttcaacggtcatccacgcctgcagcgtgccggaggtgagggcgagcggtagtcccgaggcaaaaccgaggatcagcaggatagctgattttggctgcgtgaaaatgcgtaagtaatgattagacatggcatgtcgtgcagacccggcgcgaggccgggtctgcgacttcaattaacgcgcgttttgcttgatgaaatcgtgaatgctggtgtcctgcgccatatcgctaatggtatcggtcatgacgctattaaccgcatcggcgatatttttattcgaggcctggaaggcgccttcaacagagtagctggcacgatagtttttcgtcatcttattgccgttggcggcagtggcaacgatcgcaatatcggctttggtcgcaatgttgtaacgcacgttaccttgagaaacgtcggcgtacagtttattcacgatgatttgcagatccacggcgccgttcgggccaatcatatagccacgcgaggtcatctgtttctcgagcacttcctgcaacaggaagcgcaggtcgcgggaagcggtgagcgtaacctgttggttatcgcgggtgactttcgccagcgcctgatccggacgctgatcggcgccgttaatgctgacggtcacgcccatcagactgggatcctgctgcggcagggtgattttcggtgaaacatcgatggtagtcggcggagtggcgcatccggccagcataaacagcgcgaccaaaggaaaaagaattttcttaaacatgttcagggtctcaacgcatggtggagtggtaatgaggaaaattcccgccatcataacatcgccaacggcaaggggaagtggcaacgcatgtaaattcatcgccttgtgcgttttctgtcctgactgcatctcttatcgcaacgcaggcagggctttcaggacaccgaaccactaaagccgatacttttgcatgaaaatatcagaggaatgctaattttttgttgttttcgcccaatggaagcggtaaaagcggctaacatttaaagggaatggcggcaatacagcgttgtcggaggagaaaattcatgatgatacgtgaacagatcgaagcaaaacttagggcagcgttcgacccggtgtatcttgaagtcgtggatgaaagctatcgccacaacgttcctgcgggctctgaaagtcattttaaagtggtgttggtgagcgatcgcttccttggcgagcgttttcttaatcgtcaccgtatgatttacggaacgttgactgaggaactatcaagcaccgtgcacgctctggcgttgcatacctatacaatcaaagagtgggaagggctacaggataccgtctttgcttctcctccttgtcgcggggctggaagtatcgcgtagaaatcgcatttgcaaccgctggagcttttccagtatgttgcgtgaagatttatgagaaaacggcctgcgggccgttttgttttgcctggaaaatgtgcaattcacgcatatttacaggcaaatttgctcgggaaatgtgaaaaaagccgcagcagtgggcgacaaccgttctcgactcacaaaagtgatgccgctataatgccgcgtcttttattatgaatgtcttcgggatgattctgacgacagggaatgtgtttctgatttgaagagggcatcccggttctgcgaagcaacctgttcgcgcttccagagttgaccgagcactgtgatttttttgaggtaacaagatgcaagtttcagttgaaaccactcagggccttgggcgccgtgtaacgattactatcgccgctgacagcatcgagaatgctgtcaaaagcgagctggtcaacgtagcgaaaaaagttcgcattgacggcttccgtaaaggcaaagtgccgatgaatgttgttgctcagcgttatggcgcatctgttcgccaggacgtgctgggtgacctgatgagccgtaacttcgttgacgcgatcatcaaagaaaaaattaatccggccggcgcgccgaactacgttccgggcgaatacaagctgggtgaagacttcacctacgcggtagagttcgaagtttatccggaagttgaactgcagggtctggaagcgatcgaagttgaaaaaccggttgttgaagtgaccgatgctgacgttgacaccatgctggatactctgcgtaagcagcaggcgaactggaaagacaaagacggcgctgttgatgcagaagatcgcgtgaccgttgatttcaccggttccgttgacggcgaagagttcgaaggcggcaaagcctctgacttcgtactggcgatgggccagggtcgtatgatcccgggctttgaagacggtatcaaaggtcacaaggctggcgaagagttcaccatcgacgtgaccttcccggaagagtaccacgctgaaaacctgaaaggtaaagcagctaagttcgttatcaacctgaagaaagttgaagaacgtgaactgccagagctgactgaagagttcatcaaacgtttcggcgttgaagatggttccgtagccggtctgcgcgctgaagtgcgtaaaaacatggagcgcgagctgaaaggcgccgtgcgtaaccgcgttaaatctcaggctatcgaaggtctggttaaagctaacgatatcgacgttccggctgcgctgatcgacagcgaaatcgacgttctgcgccgtcaggctgctcagcgtttcggcggtaacgagaaacaggctctggagctgccgcgtgagctgttcgaagagcaggctaaacgccgcgttgttgttggcctgctgctgggcgaagtgattcgtaccaacgagctgaaagctgacgaagatcgcgttaaaggcctgatcgaagagatggcttccgcttacgaagatccgaaagaagtggttgagttctacagcaaaaacaaagagctgatggacaacatgcgcaacgtcgcgctggaagagcaggccgttgaagccgtgctggcgaaagctaaagtgtctgaaaaagccacttccttcagcgaactgatgaaccagcaggcgtaatttcgccccaaggtttaaggtttgagcaaaaacccgttgccgaaaggctgcgggtttttttattgcaatgatagccttaggatgagtgcgaaaaggcgatttcagtgatagcgttacgacaaaagattgttatgcttgaattatggcaacgtcatccccataaccgggagacgtaactgcattggcataatcatgcgccgtaatgaagcgtgcatctatgcacttctgcccgacggcagaaattctggctgataatccgtccgtaaggttacaatcagtgcagcggtttttttcaaattaatccaggagacggaaatgtcatacagtggcgaacgagacaactttgcaccccatatggccctggtgccgatggtcattgaacagacctcacgcggcgaacgttcatttgatatttactcccgtctgctcaaggagcgcgtcatttttctgaccggccaggtagaagaccacatggctaacctgatcgtggcgcagatgctgtttctggaagcggaaaacccggaaaaagatatctatctgtacattaactctccgggcggggtgattaccgccgggatgtctatctatgacaccatgcagttcatcaagcctgacgtgagcaccatttgtatgggccaggcggcctcaatgggcgcgttcctgctgaccgccggggcgaaaggcaagcgtttctgcctgccgaactcccgcgtgatgattcaccagccgctgggcggctaccagggccaggcgacggatatcgaaatccacgcccgcgaaatcctgaaagtgaaaggtcgcatgaatgaactgatggcacatcatacgggtcaatcccttgagcagatcgagcgcgataccgagcgcgatcgcttcctgtctgcctcagaagcagtggaatacggcctcgttgactctattttgactcatcgtaattgatgccccaggcgcaagggtgccgctatacttgtttgaaagagggcggcacaacgcttcacagcggtttgcgcctgagaatggcatttgcgtcgtcgtgtgcggcacaaagaacttaataagaggtttggactcatgacagataaacgcaaagatggttcgggcaaactgttgtactgctctttttgcggcaaaagccagcatgaagtgcgtaagctaatcgccgggccatccgtgtatatctgcgacgaatgcgttgatttatgtaacgacatcattcgcgaagaaattaaagaagtcgcgccgcatcgcgagcgcagcgcgctgccgacgccgcacgaaattcgccatcatctggacgattacgttatcggccaggagccggcgaaaaaagtgctggcggtggcggtatacaatcactacaaacgtctgcgcaatggcgataccagcaacggcgttgagctgggcaaaagtaacattctgctgatcgggccgaccggttccggtaaaacgctgctggcggaaacgctcgcgcgcctgctggatgtgcctttcaccatggcggatgccaccaccctgaccgaagccggctacgtgggtgaagacgttgagaacatcatccagaagctgctgcagaagtgcgactacgacgtacagaaagcccagcgcggtatcgtctacattgatgaaatcgataaaatttcccgtaaatcggataacccgtcgatcactcgcgatgtttccggcgaaggcgtgcagcaggcgctgctgaagcttattgaaggtaccgttgccgcggttccgccgcagggcgggcgtaagcatccgcagcaggagttcctgcaggttgatacctctaagatcctgttcatctgcggcggcgcctttgccggtctggataaggtcatttcccaccgtgttgaaaccggttcaggtattggtttcggcgcgacggtcaaggcgaagtctgacaaagccagcgaaggcgagctgctgtctcaggttgagccggaagatctgatcaagtttggcctgattcctgagttcatcgggcgtctgccggttgtggcgaccctgagcgagctgagcgaagaagcgctgattcagatcctcaaagagccgaaaaacgccctgaccaagcagtatcaggcgctgttcagcctggaaggcgctgagctggaattccgcgacgaagcgctggacgctatcgctaagaaagcgatggcgcgtaaaaccggggctcgcggtctgcgttctatcgttgaagccgcgctgctcgataccatgtacgatcttccgtcaatggaagacgtggaaaaagtggtcatcgacgcttcggttatcgatggccagagcaagccgctgctgatttacggcaaaccggaagcgcagcaggcatctggtgaataattaaccattttgctcaagcagttaacaaaaaggggggattttatctccccttttatttttcctgcattcccgccgttgaatgtatggaatacatccccatatactggtttacatattaacggcgacgcgtcgttgagttgcgtcgtcggctacctggcggactttaaactaagagagagctctatgaatcctgagcgttctgaacgcattgaaatccccgtattgccgttgcgcgatgtggtggtttatccgcacatggtcatacccctgtttgtagggcgggaaaaatctatccgttgcctcgaagcagccatggatcatgataaaaaaatcatgctggttgcgcagaaagaagcctcgacggatgagccgggtgtaaacgatcttttcaccgtcgggaccgtggcgtctattttgcaaatgctgaagctaccggacggtactgtcaaagtgctggtcgaaggtttacagcgcgcgcgcatctctgcgctgtctgataacggcgagcatttttcggcgaaggctgaatatcttgaatcgccggcgattgacgaacgcgagcaggaagtgctggttcgtacggccatcagccagtttgaaggctacatcaagctgaacaagaaaatcccaccggaagtgctgacgtcgctgaatagcattgacgatccggcgcgcctggcggataccatcgctgcgcatatgccgctgaagctggcggacaaacagtccgtgctggagatgtccgacgttaacgaacgtctggaatatctgatggcgatgatggagtcggaaatcgatctgctgcaggttgagaagcgcattcgcaaccgcgtgaaaaaacagatggagaaatctcagcgcgagtactatctgaatgagcaaatgaaagccattcaaaaagagctcggcgagatggacgacgccccggacgagaacgaagcgctgaagcgtaagatcgacgcggcgaaaatgccgaaagaggcaaaagagaaaaccgaagcggaactgcagaagctgaaaatgatgtccccgatgtcggcggaagcgaccgtcgttcgcggctacatcgactggatggtgcaggtaccgtggaacgcccgcagcaaggtcaaaaaagacctgcgtcaggctcaggagatcctcgacaccgatcactacggccttgagcgcgtgaaggatcgtattcttgagtacctcgcggtgcagagccgtgttaacaagctcaaagggccgatcctgtgcctggttgggcctccgggggtcggtaaaacctctctcggccaatccatcgccaaagccaccggacgtaagtacgtgcgtatggcgctgggcggcgtgcgtgatgaagcggaaatccgcggtcaccgtcgtacctatattggctcaatgccgggcaaactgatccagaaaatggccaaagtgggcgttaaaaacccgctgttcttactggatgagatcgacaagatgtcttcggacatgcgcggcgatccggcctcggcgctgctggaggtgttggatccggaacagaacgtggcctttaacgatcactatctggaagtggattacgatctcagcgacgtgatgtttgtcgcgacctccaactccatgaacattccggcgccgctgctggatcgtatggaagtgatccgtctctccggctacaccgaggatgagaagctgaacatcgccaaacgccacctgctgtcaaaacagattgagcgtaacgcgctcaaaaaaggcgagctgacggtggatgacagcgcgattatcggcattatccgctactacacgcgtgaagcgggtgtgcgtggtctggagcgcgaaatctcgaaactgtgccgtaaggcggtaaaacagctgctgctggataaatcgctgaagcacatcgagattaacggcgacaacctgcatgacttccttggcgtgcagcgctatgactatggccgggcggatagcgaaaaccgcgtgggtcaggtgacgggtctggcgtggacggaagtgggcggcgatctgctgaccattgaaaccgcctgcgttccgggtaaaggtaagctgacctataccggttcactgggtgaggtgatgcaggagtccatccaggctgcgctgaccgtggtgcgttcgcgtgcggataagctgggtatcaactcagacttttacgaaaaacgcgatattcacgtgcacgtaccggaaggcgctacgccgaaagatggcccaagcgcaggtatcgcgatgtgtaccgcactggtttcctgtctgacgggcaatccggtgcgcgccgatgtggcgatgaccggggaaattaccctccgtggtcaggtgttgccaatcggtggtctgaaggaaaaactgctggccgcgcaccgcggcggcattaagactgttctgattcctgatgaaaacaaacgtgaccttgaagaaattccagataacgttatcgccgatttagatatccatccggtgaaacgaatcgaggaagttctggcacttgcactgcagaacgagccgtttggtatggaagtcgtcacggcaaaatagtgatttcgcgcaaattgcgctaagaaaaatagggctggtaagtaaattcgtacttgccagcctttttttgtgtagctaacttagatcgctggcaggggggtcaattacaactctgttgtaagggcatgacagtcctgatataactgctgcgcggtcgcgccacgaaggattctggtgcgatataaattataaagagaggaagagaacagtgaataaatctcaactgattgacaaaattgctgccggtgcggacatttctaaagccgcagctggacgtgcgttagatgctttaatcgcttctgttactgaatctctgcaggctggggatgacgttgcgctggtagggtttggtacttttgctgttaaagagcgcgctgcccgtaccggccgcaatccgcaaacaggcaaagaaattaccattgctgctgctaaagtaccgggtttccgtgcaggtaaagcgctgaaagacgcggtaaactgatcgacttccccactggggtctgtgacgaagtacaagggcgcatcgtaagatgtgccttttttatttgccagaatgagacttaatgtgactttatacgcacttgtgggctgacaatcaccccgttttcttgtcaaaatacgtcctcacgcgcggcggccatcacatgctatgctgcgcgagctaaagtcatctacagcggagcgttgttacaccatgatggacaacctacgcacggccgccaacagcgtcgtgctcaagattattttcggtatcattatcgtctcgttcattttgaccggggtgagtggttacctgattggcggtggtaacaactatgccgcaaaagttaatgaccaggagattggtcgcgcacagtttgaaaatgccgttgccagcgagcgtaatcgcatgcagcagcagcttggcgaccagttctcagaactggcggccaatgaaaattacatgaagaccatgcgtcagcaggtgctgaaccgtctgattgacgaggcgctgctcgatcagtatgcccgtgagctgggtctcaacatcagcgacgaccaggtgaagcaggctatcttccagacccaggctttccaggcggatggcaaatttgataacgagcgcttcagccgtattgttaatcagatggggatgacgacggatcagtacgcgcaggcgcttcgtaatcagctgacgactcagcagctgatcaacgccgtagccggtaccgactttatgctgccgggcgaatccgaccagctggcggcgctggtttctcaacagcgcgtcgttcgtgaagcgactattgacgtaaacgcgctggcggcgaagcaaaccgcaaccgacgatgaaatcaacgcgttctaccagcagaaccaggcgcgttttatggcgcctgagcagttccgcgtcagctacatcaagctggacgctgccagcatgcaggaaaacgtctctgacgaagaaattcagtcatggtacgaccagcatcaggatcagttcactcagccgcagcgtaaccgctacagcatcatccagaccaaaaccgaagcggatgcgcaggcggtgcttgatgagctgaagaaaggcgctgacttcgccacgctggccaaagaaaaatcaaccgatattatctctgcccgcagcggcggtgatatggggtggctggaagatgcggcgaccgtgccagagctgaaagaggccggtctgaaagaaaaaggccagctttctggcgtaattaaatcctccgttgggttcctggttgcccgtctggacgatgttcaggcagcacaggttaaaccgctggctgaggttcgcgacgatattgcggcgaaagtgaagcaggaaaaagccctggatgcgtactatgccctgcagcagaaagtgagcgacgcggcgagcaacgataacgagtcgctggcgggcgcagcccaggttgccggtcttaaagtggttgaaaccggctggtttggccgcgacagcctgccgcaagagctgaatttcaagccggtctctgaagctatcttcaacggcggcctggtgggcgagaacggcacgccgggcagcaactccgatatcatcaccgtcgacggcgatcgtgcgtttgttctgcgcatcagcgagcataaaccggaagcggtgaaaccgctggcggatgtaaaagcgcaggtgagcgatattgtgaagcacacgaaagcggaacagcaggcgaagctggatgccgacaagctgctgacggccctgaaagagggcaaaggcgatgaagcgatgaaagccgcaggcctgagctttggtgcgccgcagacgctgtcacgcaccggtcaggaagcgctgagccagtccgtctttgcacttccgctgccgcaggcgggtaagccaagctacggcgtgggctccgatctgcagggcaacgtggtgctgctggcgctggacgaagtgaaagcgggtacgatgccggaagagcagaaaaaagcgatgattcaggggatcacccagaataacgcccagatcgctttcgaagcgctgatgagcaacctgcgtaaagcggcgaaaattaagctcggcgacattatcgatcagcaacaataattacgtgctgcttcgcaaaagcaagtaacgtgatgtcattctcaaaggccgctttcgcggccttttccatttctgcattttgccttttgtactcttttcccttcgtcgctatcgtgaccttgctgtctacaaacaaggagataacagcatgaaacgaggaatgaaaacgcttattgccgccgtactggtttgcgcggcggggagtcagatagcgcaggcggcgccttctgccggcaaagcgtcggcgccggtaaaggaaagcgtgcagtcgccgcagtcaaaagcgccggatgcgttaaatgcggcggatagtgaaggcaccagggtgagtatcaataacgccagcgcggaagagctggctaaggcgctgaatggcgtcggcctgaagaaagcgcaggctatagtgagctatcgcgaagagtacgggccatttaaaaccgttgacgatcttaagcaggtacccggaatgggcaactcgctggtagagagaaatctgtcacatctgaagctgtaaattttcagcgaaagtttgcacagtcgtcattatttgccagactgaagaggtcatgccagtggtgtgacctctgacctcaaaacaacaattaaagataaggcatttgcgctatgcagacacaaatcaaagttcgcggctatcatctggatgtctatcagcacgttaacaatgcgcgttatctggagtttctcgaagaagcgcgttgggatggcctggaaagcagcccggccttccactggatgaccgctcgcaacatcgcctttgtggtggtcaatatcaatatcaactaccgccgaccggcggtactaggcgatgtgttaaccgtcaccagcaagctcgaacagctgaacggaaaaagcgggacgttaagccaggtagtcaccctcaaccctaacggcgaagtggtcgccgatgcgcttatcacttttgtctgtatcgatctaaaaacgcagaaagcgctgccgcttgagggcgaactgcgggagaagctggagcagcttgagcctcgctaacaggccagccggagggggatgtcccggaggcggtgctgcgcacctgtccgggctacgtttcctcagctgtctgcgattcggtagcgcgggctacgcgtcctcagcagcctgcgatccggtagcccgggcaggcgcatcgcgccgtccccgggagcaagcgcacagaaagtggcagtacttccccgaaggcgctgctgcgtatctgaccgggctatgcatcgtaagtcgcctgcgatcccgccacgccgccgggaagtaaccggttactggagcccggttttctgcttcatcaccgtcatcaccccaaccttatcgcccagatactggctcagcccgttggcgcggaggttacaggcggcgcactgcccgcagccgtcgcctttaataccgttatagcaggtgagggtttcatggcgcaccaggtcgagctggccccagtaatcggccagggcccacgtttcggctttgttaagccacattagcggcgtctcaaagcgaatatctttcgccataccgaggctgacggcatggtgcagcgctttcacgaactcgtcgcggcagtccgggtagcccgaaaagtcggtctcgcaaacgccggtgataatggcttccgccttcacctgatacgcgtaaatggccgtcagggttaaaaacagaatgttgcgcccgggtacgaaggtattcgggatgccgctggcgtccggttcataatccggaaccggaatgctatcgcgggtcaggctgctgaccgccagttcgttaagcagggtgacatcaaggactttatgggccacggcccccagctttagcgccagttcgcgagcaacgtcaatctccgcgcgatgacgttggccataatcaaaagtgacgcaatgcacttcatcatactgttgcagagcctgcaccaggcaggtcgtcgaatcttgtcctccgctgaagacaactacggcgcgtttcatggtaattcctgacaatcgaagtgaggcgcatatggtagcgcctgatgaacgtgaccaccagccccgtcacggcgcagaggccggtagccaggcgctggcgaaatcaaaccagccgcgcgcgttcagccgtagtccgttgacccccggcggcgcgctgatgcgataattataattgaacagcggcgtcatgatggcatcgtccatcagactgttaaagacgttgcgcaacgcttcgctacggctgcgttcgtccggtaaggcctgaacggcatccagcgtcgcctggagatgcgcatattgcgccccggtcagcaaattaggccacagcacgtcgcagcgtagccactgctccagcgcatagaccggcgcttcgccaatcaggcggtcgcccatcatcaggtccgcctgtgcaaactgctggcagccatcccagtttttcgcatcatggaaaataatcgtcagctcacagcccagctccgccagccgttgacgaagccgatccgccatggcgtgtagctctacggggaggtgatagagcagcgtaagccgttcgggcagaggggtatcatgattttcaggccactgcggaatagaccagcccggcaatacttcgttgctgggcgcgatcagatcctcatccagcggcagggtttctaacagggtggagcgatgaatcagcgagaccagcctttgcgcctgcgctttgttaagacgagggctctggcgcagcgtcagatagcaaaagccgaggctaatactgttgctgacctgacgtagtctggtcagttcgtcaggatcgccaatggttatctgtaccggatgacgacagctggtgcccagatcctgctcgaacagctgcggcgtgatccagtattccacggcctgcagcagcgggtgagtgagatgatagcgctgatggttttccagccgcaccaggtccggagtaaatcgcttcaggcgaaacggtccgctgccgatcgccggatcgtcaggatgcgccagcacgctgcagtagctggcaaggcggaacggcagccaataatcggcgcgatgcagggtgatagtcagacactgggagtgggtgacgctaatctcgctgatactggcgaacagcgtgcgcagcgcgggcagctgcagcagcatcaggagccgctgctgcagctgtgaggttttaatcggatcgccgttgtgccagaacagggtagaacgaatataaaagtgccagcgcaggccgtcaggcgacacctcccagtgatgggctaaatcgcctatcggacaggtactctgcgcatcaaatcgggtcagaccggaaaatatctccccggccaggtgctgctccgcgcgtcccggcataaaacccgggcgcagcggctccagcggacggtagtaaggaatacgcagggtcggcgtattgttctgccattggccgccgagaaagggggaaagcagcgctttaagctccaccggcgccagctgggccagttcgagggcattttgctgctgccctttattcagcgcctgctccatcatctcattgcgcagcgcttccggcgctttataaaactggagtagcccgcgctttccgcgaccggagctggcctgccagcttagccagccggactcttgcgcctggcgcagcagggttcgaatgtggcgttcgctgcaaaagcagcgttcggccagctcgccgacggttacctgctgcggctctccggcggagggctgccagagtcgctggtactgatgcagacggtttaatagcctcatcgctgtgtaatcctgcgtagattgggaaacccggaacaataaaatttatctattcactattacttccgtatatctcaggcaatactgcaacacaagcaaaatccaccacgatttggggagcagaagatggcaagactggctgcattcgatatggacggtacgctactgatgccggaccatcgtctgggagaaaaaacgctttcgacgctcaaacgtctgcgcgatcgcgacatcaccctgactttcgccaccggtcgtcatgctctggaaatgcgccacgttatcggcgagttctctctggatgcgtttttaatcaccggcaacgggacgcgcattcactctctggaaggtgaggagctgtatcgccgcgatctggctcccgatgtggcggaagaggtgctgcacagcgcctgggaaaccacggcaagtatgcatttctttaacgacggcggctggtacaccgggcaggcgatcccggaattactgaaagcgcacgtctttagcggttttcgttatcagctgtacgatccaaagcggatgccggcgcatcaggtcactaaaatctgcttctgcggcgatcatgacgatttgcggcggctaaggcttcaactgagtgaagcgctgggcggccgcgcggatctctgtttttcggcgatggattgccttgaagtgttgcctggcggctgtaacaaaggcgcggcgctggcggtattaagccagcatctggggctgacgatgcaggattgcatggcgttcggtgacgccatgaacgacctggaaatgctcggcagcgtcgggcgcggcgtgattatgggcaatgcgatgaatcagctgaaagcggaactcccacatctaccggttattggcgactgccgtcatcaggccgtctcccactttttgactcattggctggataatcccgatcttccttattcccccgaataaagagaccctgccagcaagccagatatcctgtgatacctggcttcttttattttgcctgcagcatgtcggcgatttgtgcctgccatggggagatatcgccaatattggccgctacccactgcgggttgtagtaggtttccagataacgttcaccgctgtcgcacagcagcgtgacgagagagccggtgcgcccctcttcgcgcatccgcacggccagctgcagtacgccccacatgttggtgccggtggaggcgccgaccttacgtccgagcagcgtttccagccatagcgcggtggcgacgctggcggcatccggtacccgcagcatctcatcgaccacgtcgggaataaacgacggttcgacgcgcgggcggccgatgccctcaattttactgccgaccgggctgcgcaggctggcgtcgcggctctgccagtagtccataaacaccgagttttgtgggtcaaccaccagcagctgcgtatcgtagccctgacaacgaatgtagcgtccgatggtggcagaggtgcccccggtgcccgcgctcatcacgatatacgacggctgcggatgcggctcgtggttcatctgacgaaagatactgtcggcgatattattgtttccccgccagtcggtcgcccgttcggcataggtaaactgatccatataatggccgttcagctcgcgggccagggtttcggaggcggcatagatttcgcaggcgctatcgacgaagtggcagcggccgccgtagaactcaatttgttcaattttacgttttgccgtacaggaaggcatcacggcgataaactgcaggcccaagagacgggcgaagtaggcttcagagacggcggtcgaaccggaagaggattcgataatcgttgtcccttctttaatccagccgttgcacagaccatagagaaacagcgagcgggccaggcggtgcttcaggctaccggttggatgggtgctttcatccttcaggtagagctggatccccgggaaccccggaagcgccagacgaataaggtgcgtgtcggcggaacgctgataatcggcattaatttcactaatcgcgtgtttaacccaggcgctgttcatctcaaattcctgtttgtcattttgtgcccagcttagcggaaatagaaggaaaaattgttgccatttagcctttcaattacaatgaatggagtaaatttttctcccaaggtgccctatgttagataaaattgaccgtaagctgctttctttactgcaaaccgactgcaccctctctttgcaggcgctggccgatgccgttaatctgaccaccacgccctgctggaagcgcctgaagcggctggaagatgaaggtattctgcgtgggcgcgtcgcgctgctggatgcggaaaaggtcgggcttgggctgacggcgtttgtgctgattaagactcagcaccacagtagcgactggtattgccgcttcgtcagcgaagtcacgcagatggcggaggttcttggtttctggcgtatggcgggggagtatgactatctgctgcgggtccaggtggcggatatgaagaactacgatgatttttataaacgcctggttaacagcgtgccggggctctcggatgtgacttcgagttttgccatggaacagataaaatacaccactgccttgccgattgattaacggcatcagccgctacgaattacacactcaggatttaactgcttgcgattatttgcccaacttagctggtatttccgccgggagtggcgtcgttacctcggcgctattgctctgctgatcgtcattgccattctgcaactggtgccgccaaaggtggtgggtatcgtggttgacggcgtaacaaaacaacattacaccgcggaaaaggtgtggatgtggatcggcctgctggtcgttattgcagtgatggtctatctgctgcgctacgtctggcgcgtattgcttttcggcgcctcttatcagctggccgtcgaactgcgcgaggatttctatcgccagctcagccgccagcatccggccttttacctgcgccaccgtaccggcgatctgatcgctcgcgccaccaacgatgtggatcgggtggtgttcgccgccggcgagggggtattaaccctggttgactcgctggtcatgggctgcgcggtgctgattgtcatgtcgacgcaaatcagctggcagttaactctgctggcgctgctgcccatgccgctgatggcgctggcgattaagcgtaacggcgatgcgttacacgaacgctttcgcgtcgcgcaggcggccttctccagcctcaacgaccgcacccaggagagcctgaccagcatccgcatgatcaaagcctttggcctcgaagaccgacagtcggcgctgtttgccgccgacgccgcggataccggggcgaaaaacatgcgcgtggcgcgtatcgacgcccgctttgacccgacgatttatatcgctatcgggaccgctaacctgctggccatcggcggcggcagctggatggtgatccagggcagcctgaccctgggtcagctcaccagctttgtgatgtacctcggcctgatgatctggccaatgctggcgctggcgtggatgtttaacatcgttgagcgcggtagcgcggcctatgcgcgcattcgcaccatgctggaggaagcgccggtggtgaacgacggcagcgagccgacgccggaaggccgcggtgcgcttagcgtcgccgtgcgcgagtttacctacccgcaggcgaacaaggtctcgctggaaaaggtcaactttacgctccagcccgggcagatgctggggatttgcgggccgaccggctccggcaagagcaccattctggcgctgattcagcgccactttgacgtgactgaaggcgatatccgcttccacgacgttcccctgacccggctacagctggatagctggcgcgcacgtctggcggtggttaatcagacaccgttcctgttctccgataccgtcgccagcaacatcgccctcggtaaaccggacgccacgcaggagcaaatcgagcacgttgcgcggcttgccagcgtgcatgaggatatcctgcgcctgccgcaggggtataacaccgaagtcggcgagcgcggcgtgatgctttccggcgggcaaaagcagcgaatttccatcgcccgcgcgctgctgctggaggcggagattctgatccttgatgatgcgctgtcggcggtggacggcagaacggagcaccagattttgcataacctgcggcagtggggagaggggcggacggtgatcattagcgcccatcgcctgtcggcgttgaccgaggccagcgaaattctggtgatgcagcacgggcatattgcccagcgcggtcgccatgaggcgctggcggcgcagccgggctggtatcgggatatgtaccgttatcagcagctggaagcggcgctggatgatgtcccgcaggaagataaggaggtcgccggtgcgtagtttcactgaactctggccgacgttaaagcgcctgctggcctacggctccccgtggcgtaaaccgctgatgatagcggttgccattatgtgggttgcggcggtcgcggaagtcagcggcccgctgctgatcagctatttcatcgacaatatggtggcgaagaactcgctgccgttgaagctggtctgcggcctcgccgcggcctacattggcctgcaactccttgccgctggcctgcattactgccaggcgctgctgtttaatcgcgcggcggtcggcgtggtgcagcagctgcgcagcgatgtgatggacgccgcgctgcgtcagccgctcagcgagtttgatacgcagccggtcgggcagctcatctcgcgggttaccaacgataccgaagtgattcgcgatctctacgtgaccgtggtggcgaccgtgctgcgtagcgccgctttgattggcgcgatgctggtggcgatgttcagccttgactggcggatggcgctggtggctatcgctattttcccggcggtgctgatcgtgatgatgatttatcagcgctacagcacgcccatcgtcaggcgggttcgcgcctggctggcggacatcaacgacggttttaatgaagtgattaacggcatgggcgtcatccagcagttccgccagcaggcgcggttcggcgagcggatgcgcgaggccagctacgcccactatctggcgcgtatgcaaaccctgcgtcttgatggcttcctgctgcgcccactgctgagcctcttctcttcattaattctctgcggcctgctgatgctgtttggtttcagcagcagcggaacgatcgaagtcggggtgctatacgcctttattagctatcttgggcgactgaacgagccgctgatcgagctgaccacccagcagtcaatgctgcagcaggcggtcgtggcgggcgagcgcgtcttcgagctcatggacaaaccgcgtcaggcgtggggtgaggatagcgagccgctgcgcagcggggcgatgagtatcgatcacgtctcttttgcctaccgcgacgatagcctggtgttgcaggatattaatctcgatatcccgtcccgcagctttgtggctctggttggtcataccgggagcggtaaaagcaccctggccagcctgatgatgggctactacccgttaacccagggagagattcgcatcgacggtcgtccgctttcttccttaagccacagcgcgctgcggcaggggattgcgatggtgcagcaggatccggtggtgctggctgacaccttctatgccaacgtcaccctcggtcgcgacatcagcgaagagcaggtgtgggaagcgctggaagcggtacagctggcggcgctggcccgtgaaatggaaaacggtatttatacgctgctgggcgagcaggggaataatctctccgttggccagaaacagctgctggcgctggcgcgggtgctggtcgatacgccgcaggtgctgattcttgatgaggcgacggccaatatcgattccggtaccgagcaggcgattcagcaggctctggctcgggtgcgcgagcacaccacgctggtggtgattgcgcaccgcttatcgaccatcgtcgaggccgatacgatcctggtactgcaccgcggtcaggccgttgagcgcggaagccaccagcagctgctggcggccagaggccgctactggcagatgtatcagctgcagctggctggcgaagagctggcggccagcgcgcaggaagagtcgcttatcgcctgatgcaccataaacaggcagcggcgccgccgcggcctgaggtggtgcaaaatcgtcacaagctgcgcactgaaatggtgcagtttcaggcaaaagaggcattttgccgcttcgtttccgccgaattattctccttcctcctcaaaaagggccgcctggcggtcctttttcatttctggcatagcccttgctttattagagacgtgttagctgcggccattaccgaattctgactggaggggacttatgaagctggttaccgtggtaatcaaaccattcaaactggaagacgtgcgtgaagcattatcttcaatgggtattcagggcctgacggtcactgaagttaaagggttcggccgtcagaaaggccacgcggagctctatcgcggcgcggaatatagcgtcaattttctgccgaaagtgaagattgacgtcgcgattgccgacgatcagctggacgaagtcgtcgatgtcatcagtaaagcggcttacaccggaaagattggcgacggcaaaatctttgtcgccgagctgcagcgcgtgattcgcatccgtaccggcgaatcagacgaagcggcactgtaactttcagaccacacagtgatggggaacgaaacaatgaagatagcaacaatgaaaacaggtctgggagcgttggctctccttccggggctggcgatggccgcaccggcggtcgcggacaaagccgacaacgcttttatgatgatttgcaccgcgctggtgctgtttatgacgattccgggcatcgcgctgttctacggcgggctgatccgcggtaaaaacgttctctccatgctgacgcaggtcatcgtgacgtttgcgctggtctgcgtactgtgggtggtttatggctacacgctggccttcggcgctggcggcagcttcttcggcaacttcgactgggtactgctgaaaaatattgaactgaaagcgctgatggggagcttctatcagtacatccacgttgctttccagggctcctttgcctgtattaccgttggcctgatcgtcggtgcgctggcggaacgtattcgtttctcggcggtactgatattcgttgtggtatggatgacgctctcttatgtgccgattgcgcacatggtatggggcggcggtctgttggctacgcacggcgcgcttgatttcgccggcggtacggttgttcacatcaacgccgcggtcgcggggctggtgggcgcctacatgatgggcaaacgcgtcggctttggtaaagaagcgttcaaaccgcataacctgccgatggttttcaccggcaccgccatcctctacgttggctggttcggctttaacgccggttcagcaagcgcggcgaacgaaattgccggtctggcgttcgttaacaccgtggttgcaacggcggcggctatcctggcatggaccttcggcgagtgggcaacccgcggcaagccgtcactgctgggcgcctgttcaggggcgattgccggtctggtcggcatcactccggcctgtggctacatcggcgttggcggctcgctgattgtgggtatcgctgcgggccttgcgggtctgtggggcgtcaccgttctgaaacgctggctgcgcgttgatgacccgtgcgatgtgtttggcgtccacggcgtctgcggtatcgtaggttgcatcctgaccggtatcttcgccgcgacttctctgggcggtgtgggctacgcggaaggcgtcaccatgggccatcaggttctggtacagctggaaagcatcggtatcaccatcgtctggtcaggcgtcgtcgcctttatcggttacaaggttgccgatatgaccgttggcctgcgcgtaccggaagatcaagagcgtgaagggctggacgtaaacagccacggcgaaaacgcctacaacgcctgataaaacgagttatctcctgaagctgcagagcctcccctcggggaggctctgcttttttatgcgttgcgattacgcatgacgccttcctgcaccgtggaagccaccagcgtaccgtcctgagtgtagaactcgccgcggacaaaaccgcgcgcgctggaggcggaggtgctctcaacgctgtacagcagccagtcgttgatgttgaacgggcggtggaaccacattgagtgatcgatggtggcaacctgcatgcccggctccagaaaaccgacgccgtgaggctgcagggcaacgggcaggaagttaaaatccgaagcgtagcccagcagagactgatgggtgcggagatcttccggcactgcgccgttggcgcggatccagacctgacgcgttggttctgcaacgtgtcctttcagagggttatggaattcgaccgggcgaatctccagcggtttatcgcagagaaatttctctttgacctgcggcggcagcaggtgggccagcttgcgggcaatatccgtttcggagggaagcgcgtccggagcgggtgccgctggcatggttttctgatgttcatagccgggttctggcgcctggaaagaggcggtcatatagaaaatgggcttcccgttttgaatcgccgccacccggcgggcgctgaagctattgccatcgcgcaggacttcaacatcatagatgataggtttcaggctatcgccgggacgcaggaagtagctgtgaaacgagtgaatcaggcgttctgtgggcaccgtctcttttgccgcatacagcgcctgacccactacctggccgccaaagacctgtcgcaatcccagatcttcgctctgtccgcggaacaatccctcttcaattttttccagatttaacaatgccagcaaatgggttagtgcctgactcatagttatcctcaatcaatgatgactgcctggcgcagcgcgttattgaggcaaagtataacctggaatcgcaagtggtccgatgggttcaataatctgaatatgggctcttttccaggaagagatctgagatctgtgccacacttattcacgatactaatgtcctgtccccgattgtggctggatgtactcctgttaaagaagggatgaaaaggagaaaagaatgaaatttgcctatatgttaagtgctttagccgtagcggctacgctgtctgcctgtgcgaacaaccacaacagcaatgcagcgaaccaggcggcgcccgatccttatggcattgcctcactaagctcctcgcagcagcagcctaacgtatccgggaccatcaatattcgacagcgcgtggcgttaccgccggacgcggtattgaccgtaaccctgtcggatgcgtctctggccgatgcgccagcgcacgtgctgtcgcaaaaagcggtaaggaccgaagggaagcaggcgccgtttaactttgtcctgccctataaccaggcgcaaattcagcctaatgcccgcattcttctcagcgcggcgattaccgttaacggtcagctgatgtttattaccgataccgtgcagacggtgattaaccagggcggtaaccgggccgatctggtgctggtgccggttcagcaaacggcggtgccggtggcgaacaacagcgctcctgctgcccagtaactccccaccatgcccctttacaggggcattttttttgccttcaataaatccagcggtagtgctgcagatcaatatgtccgctgcctgaaacctggacgccttccgccagtagcgcctggcgttggcgctgcagatctggtccggtaagggagatgtcgccgtggcggttgacgacccgatgccaggggagagtcgatccttccggcaggcgctttaatactccgcccacctggcgagccgctcgcggtgaacccgccagctgagcaatgtcgccgtaggtggcaacgtatccctctggaatcgaggcgactatctgccagacccgctgcggaaaagtatcgtgagaatccatagtacgtcctgttgccggaaaaggctcaggataagcgttgtatgatgggctgtacagatagcgggtcaggccgatttaacgacggtaaattccagcgccagacccagcacctgcatgccatgaacattttcattcgccgtattgctcagcagtgtttcaagaaacttcaggcgttttgactgggcgttaatcaccagctttgcgcgcattgccggaagcttaagcgttgatatcggatacaccacgcgaccgctgacgtcgatggggagtttccgtaattcaatgtgctgaaggacgccgacagtagagtagagcagcgcgaccggggtgacggcgagcagctgattattgctaatcgtcacaaaatcgaggatgacctccggacgcagaaagtttaaaccgcggaaggaaacggtcacttcggcgatggccggcatcgccagggtagtgattaaacgcggtgattcactcattcatataccattgagacagtgcgttgattaaaaaagacggtagataagcctcattatggccgctggcgaggatttccgctgagagtgtgctcgcaatctcatcaggggatcggggccattttacgctgagaagccgctgtagacgcgactttgcgcaataaaccagcacccaatcgccggcggcttgcaattcaggggttcagcagggataatgcgccagcgcgttaggtaactagcgctctcaatgggggctctgttggttctcccgcaacgctactctgtttaccaggtcaggtccggaaggaagcagccagagcagacgacgtgtgtgccgggatgtagctggcagggcccccacccatttcagggtgccctctcgctattcgcattcattccgtggtttcccccagccttcatatttaatatccacaaatagattgtgagtatttttcgtttctaaaccctctattttttatgccaaaaaattcactacgtcataaatttgaaatttaactgaaatattattgtcatctttatgtcatatataacgtgcagattattcatgggaaaatgttgtttgatataagctaaaaatatatctctggatcagcatgttaacttcgtgtattaattatatgatgattttatttcacgggaagcgtgactatgaccactgtggttctgaacgtaaaaattgatggcgagttaaaagaaaagctgcgtcagtatgcggaagaaaataacgaaaatttaggaacagctacggagaaactgctgctgctggcctttcaggtagcggaatcagcagacgaggcgggggtttcggaagaagatatcgatagccagcataccgaagaggaagcgtctccattaacccctaaagaaatcaaagcattacgtaaaattctgaagaagaaaaaatgaaacaacaactctctacagccagcaactatagcgaagcctgcgatatgctgcgttccggatacgttaagcacgtacgcctgaactggaatatcggtagcgatgagttctttcgcattgcctccgactggtgtgacacaggggcaaaaataaaaaaagatgaagacggctttattatttctctgaaagggtttccgatcccgcgtcagcattaatgaaactattgcaattttgtcatcgggctgacacgtcagaaagacaaaattgaagcgcaattttataaaaacatctcatatgcgtcatggatgatggtttttgacgggctggctccagcccgtcgatattttcttaaatgattttcctcaggcggaagctctctttctgctcagtcaggctatgccacaacggctgcaatgtcgtaaatgcgctgcgcagttcgtcatccgaaagggtaaagggcaaacgcaaatagcgatcaaacgcgccggccaggccaaagcgagttcccgtcccgatgtgaatcccccggctttcagcgcgaacggaaaagagcgtcgccagcattcccggtaattccacccaaaaagagagtcctccctccggcggcgtaaagcgccagtggggaaaatattccgccatcagcgcgccgcacatattccggcgagtcgccagcatggcgcgccgtgacggtagcagcctgtgctcattctcaagcaaccagcagcaggccagctgttccagcagcggggagccgagatcgagagagtcgcgggcctgaaccagcgaagcaatggttcgcgaagaggcgcggatccaacctatgcgcaggccgccccagaagctttttcccgctgaaccgatggttatcaccggggcatcaggattaaatgccgctaaaggcggcggcggcggggcgtcataccataaatccaccatcgtttcgtctgccaccagcgtggtgcgggtttgtgcggcgatgtccgctacccgctggcgcgttgcgctatccatacagcggccggtgggattatgaaaatccggcatcagccaggccagacgcggagccgtttgggcaatcgttgccgccagaccgtcgcaatcccatccctgctgcggtaacgccacgctaaccggacgacatgatgcgccctgtatcgcgctaagcgccatggggtaagttggcgcatccaccaccacccgatcgccgggcccggtgaataaacgcagtaccagcgcaaagccgctaagcgccccgttgacgatcatcacttcatcgctgcgggttggcagcccgcgttcgctatagcggcgggcgatggcttcgcgcagaagcgggagcccttgttgatcgtaaccggtgttggataaatgttcaggcatgatctttaaggcctggctgtaggcctgatggatctcggggccggcgctaagggcggcaacggccagattcaccgatagcgggtccgtttgtttggccgccgcctctaccggacgctccggcaaggcgatccgcgaaccgcttccctgacggctgtagagatagccttcttcccgaagctgaccgagcgcgctggcaaccgtggtgcggctgatattcagggcagccgccagttcacgttcgccgggcagtcgcgtttccagcgccaggcggccatcgagaatgagcaggcgcagcgcttctgcaagctgacgccagataggcgtgcgagaagtggactcctgccagtgaccgagcagccgtaccagcgattgtgcaccaaagcgacgagataacatagcaatccactttttaaaaactggccattaattatcaatccatttttactgatgataaaggaaatcgcaattgccctgaggtgaaaaatggtacgtcgcttgttgcaactttacattggtctggtcctgtacggcgtgtcgaccgcgttatttgtgcatgccaatctgggggccgatccgtgggatgtttttcatctggggatcggtaagcagtttaatctggattttggtacggtcatgatcctgacgggagcggcagtgctgctgctgtggatcccgctacggcaaatgccggggctgggtacggtgagcaacgtgattgtgctggggctggcggcaaacgcgaccttagccgtgctgccgccgttggattcgctggtggcgcgtagcctgctgctggcgggcgctatcgtactgaatgcgctggcgacggggatgtatattggcgcgggctttggtcccgggccgcgcgatgggctgatgaccggtctgcatgctcgtacggggtggtcgctgcgcggtatccgcaccgcgattgaagtttcggtcctgctgattggctggatgatgggcggcaagtttggcgtgggaaccgtactctatgcgttaactatcggcccgctaatccagctgtgtctgccgtggtttcatcagccagccgcgcggaaggctctggcgaaacccggtgaggctatctcctgattttacgctgccatcagacctggagactaaacttatcaattcagatacggccggattctccggccgtactgttcacttcggagagcagactcatgaagtacgttgatggttttgtcgttgccgtaccggcggaaaataaggaggcataccgcgagatggcagcaaaggccgcgccattatttaaagagtttggcgcactccgcgtggtcgagtgctgggcggatgatgtcccggatggcaagctgaccgattttcgcctggtggtgaaagcggaggagagtgaagaggtggtgttcagctggattgagtatccctctaaagaggttcgcgatgccgcgaatgccaaaatgatggccgacccgcggatgaaagagtttggcgaatcgatgccctttgatggaaaacgaatgatatacggcggctttgccccgcttctggatgagtaattcatctttgccatccccatagcttttggggatggctatagatgcgctacagatgactccagccatgcagcagcatataaaaacccaccaccataatcagggtgccggaaatccacggcgctttgcgcgagagatcgttcagcccgggccagcggtttgccacgtgcttcaggctgagggcggcaattgccccggaagccaccagggtgatcgccagcccaacgctaaaccccagtaccagggttgcccccagcgagaactttttcaactgcaggcaaatgagcagtacggtaatggatgccgggcagggaatgagtcccccggtcagtccgaacaagacgatctgcccggtggtgacccgctggccgttaaagcggcgattgatcgcttgcgcatgcgcgcgctggtgggcgtcctgccagtcatcggcggcaacccgcgaaggttggtgagcgtgaggatgatgttgatgcgcaaggtggcgatcgtgatgatgttcatgttcatgttcatgttcatgttcatgttcatgttcatgttcatgtttatggtcatggtcatggtcatgttcgtgtccatggatatgtgaacgcgattcgcgccaggtacgcgccagcatccagcaggcaatcagtacgataaggccccctgagatcagctgaaaccagggttccgacgtttgtgcattccagccgcggccgaaccacaggcctgccatggccaccagccagaccaccgccgtatgcgataccgtcgccgccagccccagcagcaccgcctgctttaatgttccccgcaccgccacgataaatgccgccatcatggtttttgagtgcccgggctcaaggccgtgcagcgcgcccagcagaatcgcgctgggaataaatagccaggcgttgccctgctgcaagagtgaagcgaaatcgttcataacgtgatccctaactaaaaagtgcttgtatgctactcccccccagtacataaatactaccccccagtagaaaaatactccgggggagtagggcatgttatgctgttctgattgcatacaagggtcgttagtggaaacgatcgattaatcaaatagtggatcgcgaaatgtcacataccgttcgtcacaagaagatgttattgacccgattgaagaaaattcaggggcaaagcgccgcgctggaaaaaatgcttaaccgcgagcatgaatgcgcagaggttctacagcagctggctgccattcgcggtgcggtaaacggcatgatgatgcaggttatccaggggcatttaacggatcatgtcgtgaaggagccggaagaaggtcagcgtgaggctgaccttgatgtggtgatgcaggtgataaaatcctatctgaaataggctcagtcatcatgtgttccggacggcgatgaatacgccttaaggttattctcggcccacagaataaatttctcttttggcagcgccttactataaagccagccctgtgcatacagcacgccatgcatgcgcagccagtcgcgttggctttcggtttcgacgccttctgcgacggtcgccagattgagcgctttcgccatttcaatgatgtgcggcgtcagcgattcacactccagcgtatcgacaaatgctttatcgatttttagggtatcaacgtccagcttttgtaaatagctcaggctggaatagccggtgccgaagtcatcgatggagatacggtgtccggcctgacggtagccggcgatgactggcagagtggtttgcgggtcgacaaaaccgcgctcggtgatttccagaatgatctgctgagcgctgatgccccagcgctgaagctgctcttgtaacagcatcggcagctttggcgaacgcaaatcatcaaccgacaggtttatcgagatgtgtatctccgggcgctgccgcagccaggtaccgagatcggtaaatattttccgtacaatatcttcggttaagcgggtaatcagcccggtttgttcggcaagcggaataaaaatatccggtgataagaaactgccatcgggctgcctccagcgagcaagcgcctctgcgccgacgatctttccactctgcagcgaaataatgggctggtaataaacctgaatggcatgagaattcagcgcgtccagcatcccattacgcggtgagcgcagcctccgcagcaggcgaagcagcagaaatgaggccagaaggctggtgaacagaccaatcggcagccacagcatcagctgctgatgtagctttttctgcagcggcaccgtcgaggaccaggtggcaatggccagccccagctccgggagacgatgaagacgataaacggtgctatcgagggttagggtcctggcatactgatgcttaattttctcccagacggcagcgttgagtggtttactgctaatgatgatttgatcgcgctgcgtgccgaataagagcgtgtgaatcttttcatggcctaatggaatgacatcgataaacgacacgggatcgatcatcaccacgtgatgctcgctgcccatggccgtcattttatgtttcagacccaggtcgttaactgaggtaagccaggtacggtagccatcggccgtgatatggtcgggagcaggaaaggtaaccgaaacctgatgctcttcgagggaagagcactgcggaataccctcatgtaaccacagcacttcctgaacgtagcgatgggtataggcgatccgtcgcatcgtgagcaaatgctgcggactgcaggtggtagccgcatgcgcatcagcttccttcagcgcctctcttgcctgatcggcaacctgctgaacgcgggccagtacgcggacggaaaagttgtccagttcgctataaaattgctctttggcctgctgcattgccagccagatgctcagcgcgaccggcaggataatggcgagtatcaatacccctgtaaccagactcacctgatgccgggtcgtcatgagtatttccttattttattgaggggttcgatgagtatacgcgaaagataaaagaggattcagcacggggtagaaaaaggcccgaaccgcaagatagcaacgaattcgggctaacagtggatgaaccgcgacgcccaaggcctggagcgtcgcggagaaaaacgagggctggtatgctggcaataagcgttgtcagcacagattcatattctaaagcgcaatcatgacagtcatatgttgcgcttaatgggcgtccggggcagcgatgtcagcgctaatccgctggtcgttttcgtcaaagaccatgcagtagcgatcgtcaaacgcgacccttatcttctgccatggacggaaatgaacgtcgccgggcagcagaattttgacattatcgtggccgtagcactggccgaacagataggtgttgttacccagtctctccacgacttcacattgaaactcaactacggtaccgatattcacatcagttgagagatgttcagggcgaataccgagggtaacggcagcgccgggctgcagcggcgatgtggtgatattaagcgtcagattatgatcttgcgccatcttcacgctaagctggcccggctgccatgcggtgaccgtcgcgggcaggaagttcattttcggcgaaccgataaatcccgcaacgaacttattgaccgggttgtaatacagcgacatcggcgaacccatctgctcaactttgccgtagttcatcaccacgattttatcggccagcgtcatcgcttcaacctgatcgtgggtgacataaaccatggtggttttgagttcatgatgcagtttagcaatatgcaggcgcatctcaacgcgcagctcggcatccaggttggagaggggttcatcaaacataaacacccgtggattacgcacgatggcgcgaccgatcgccacgcgctggcgctggccgccggaaagctgcttaggtttgcgatccagcagatgagagagctgcagcgttttcgccaccatttcaacctggcggcgaatttcatcttttggcactttattcaccttcaggccatagcccatattttccgctaccgtcatatgcgggtagagcgcataggactggaataccatggcgacgccgcgatgggcaggaacgacatcattcatcacctcatcgccaataagcacttcaccttcgctcacctcttcgagaccggcaatcattcgcagtagcgtcgatttgccgcagcctgacggaccgacgaaaaccgcaaactcgccatcttcaatatcaagatttacctgatgcagcgtcactgtactgccgaaccgtttggtgacattcctcagtcgtatattggacatcaacattccccgggttagtagccgtttttgccgttgggatttgggctgtgacgcattatttgtataacgtgtaacaattcagcctggcgatgctcaacgacactaaaatcatgcagtgactataacttccagagttttagcgccctatatcgatgtttcatttctgcaatcacgatcacacaactggcagctttcagtagttttgtcagcattcaaagcgtaccgtataacaaatcaggaataacggcatatttgtttatgaatcaccgtttatcagttaactgaaagattctcggaagtcacatcgcccaataaaaaccattaaattgttataccttcacatgaggttgataatgaaaaagaacactcttgctgcactgatccttactactctggctgccgggcagctggttagcctgcaggcgcacgcggccggacagctcaacgtctgggaagacatcaaaaaatccgacggcattaaggccgcggtaagcgattttgaaaagcagttcaacgttaaggtgaacgtgcaggaaatgccgtacgcccagcagcttgaaaagctgcgccttgatggcccggcgggcattggcccggacgtgctggtgatccctaatgaccagctaggcggtgcggtcgtccagggactgctgtctcccctgacgctggacccggcgaagcaggaggcctttacgccggcatcaatcaacgcgttccatatggataacgtgctttacggcgtaccgaaagcggtggaaaccctggtgctgatttacaacaaagacctgatcgataagccgctggatagcctgcaggactggttcgactattcgaagaagcagcgcgaagagggtaagtacggcctgctggcgaagtttgaccagatctattacagctggggcgctattggcccaatgggcggctatatctttggcaaaaacgacaaaggcggcttaaacccgcaggatgtcggcctgaataagccaggcgcggtggaagcggtgactttcctgaaaaaattctacaccgacaaggtattcccggcggggatcctcggcgataacgggctgaacgccatcgactcgctgttcaccgagaagaaagcggctgcggtgattaacggcccgtgggccttccagccgtatgaagcggcaggcattcattatggcgtcgcgcctttgccgacgctgccggatggcaaaccgatgagctccttcctcggcgtgaagggctatgtcgtctcgacgtggagtaaagataaagcgctggcgcagcagtttatcgagttcatcaaccagccgcagtacgtgaaagcgcgctatgtcgccaccggggaaatcccgccgctgaaggccatgattgacgatccgctgattaagaatgacgaaaaggccagcgcggtggcggtgcagtcagcgcgggcgacggcgatgcccgggatcccggaaatgggtgaggtatggggcccggcgaacgccgcgctcgagcttagcctgaccggtaaacaggagccgaaggcggcgctcgataacgctgaaaagcagatcaagatgcagatcgaagccatgcaggccagcaatcaataattcggtgatgtaacagaacgggagggccgtcctcccgttttcagaaggagtcgtgtgtgattatcaatcccagcgaaaatattgccgaagcgcgcggcgcaggacgccatgcgtggtgcggcctgttgctggctatcgtgccgggttttgggcagttttatcaccgccagtggctgaaggggattgtcttcctggtgctgctgagcagttttatgagcattttctatgactttctcagcgaaggcctgtgggggttatataccttaggcgaggaagttccgcgggataactctattttcctgctggcggaagggataatcagcgtactgattatcgcattcggtttgttggtctatttcctctcgctgcgcgatgcctgggttaacggcaaaaagcgcgatgaaggcatggcgctgaatagcgtacgcaagcagtatcagatgctgctcagcgagggtttcccgtatctgatgatcacgcccggcttcatactgctggtgtttgtggtcatcttcccgatcctgtttggttttgctatcgcctttactaactacaacctttatcacacgccgccggcgaagctggtggattgggtgggattcaaaaacttcatcaatatcttcacattatccatctggcgctcgaccttctttgacgtactgcagtggacggtggtgtggacgctgctggcgacgaccctgcaatgtaccgtcggcgtgctgctggcgattctggtcaaccagaaagatctgcgctttaagccgatgatccgcacaattttcattctgccgtgggcggtgccgggcttcgtgacgattctggtttttgccggcatgttcaatgattcattcggggtgattaacaacgccattttgtccttctttggcatcacgccgaaggcctggctgaccgacccgttctggactaaaacggcgctgatcatgatgcaaacctggctgggctttccgtttgttttcgccatgaccaccggcgtcctgcaggcgatcccggacgatctgtatgaagcggccaccatggacggcgccagcgcgtttacccgcctgcggaccattactctgccgctggtgctctactccattgcgccgatcatcatcactcagtacaccttcaattttaacaacttcaatatcatctacctgttcaataacggcggaccggcggtagccgggtcgaatgccggcggtacggatattctggtgtcgtggatctacaaattaacgatgtcgtcttcgcaatacgccatcgcggccaccatcacgattctgctgtcgatttttgtcgtcggcctggcgttgtggcagttccgcgccacgaaatccttcaaaaacgacgacatggcgtaagggaagcaacatggctaaatcaccgagtattaaacgcgaaaagtggattcgcctgtctctcacctggctggtggtcctcttcgtatcgacgatcattatatatccgctggtctggacggtaggggcgtctctgaacgccgggaacagtctgctgagtacgtcgattattcctgaaaacctgtcgttccagcattacgcggatctgtttaacggcaatgtgaattatctcacctggtactggaactcgatgaaaatcagcttcatgaccatggcgttgaccttaatcagcgtgagcttcacggcctatgcgttctcccggtttcgtttcaaagggcggcagaacgggctgatgctgtttctgctgctgcagatgatcccgcagttctcggcgctgattgcgatctttgttctctctcagctgctggggttgatcaacagccatctggcgctggtgctgatctacgttggcggcatgattccgatgaatacctggctcatgaaggggtatctggacgcgatccccaaagatctggatgaatccgcgcggatggatggcgccagcagcttccgcatctttatcgaaatcattatgccgctgtcgaagccgattctggcggtggtggcgctgttttcatttaccggccctctgggggatttcatcctctccagcaccattttgcgtaccccggataaatacacgctgccgattggcctgtataacctggtggcgcagaaaatgggcgccagctacaccacctacgcggcgggcgcggtgctgattgccgtcccggtggcgattctctatctggcgctacaaaaatactttgtttccggcctcacctcaggcagtacaaaaggataaccccatgaaaagattaacacccgcgtggcttgctgtttctctggcatgctgtttttccgccggtacgctggcggcagatgcgctgcaaacgaaggcgtttagcaatatgcccgctgattttattaaaggcgcggatatctctacgctgctggatgcggaaaagcacggcgcgaagttctttaaccacaacaatcagccgcaggatccgatcgcgattctgaaggccgacggcgtgaactatgttcgcctgcgcctgtgggtggatccaaaagacgcccagggtcagcgttacggcggcggcgataacgatctggcggcgacgctggcgctggcgaagcgcgcaaaagcgcagggtataaagctgctgcttgattttcactacagcgatttctggaccgatccgggcaagcagttcaagccgaaggcctgggagaaaatggattatccgcagctgaaaaccacgatccacgactacacccgcgacacgattgcccgctttaagcaggagggtgtgctgccggatatggtccagatcggcaacgagatcaacggcggtatgctgtggccggagggcaaaagctgggggcagggcggcggcgagttcgatcgcctggcggggctgcttaacgccgccattgatggcctgaaggaaaacctcaccggcggcgagcagattaaaattatgcttcatctggccgaaggcacgaaaaacgacaccttccgctggtggtttgatgaaatcagcaagcgcaacgtgccttacgacatcattggtctgtcgatgtacacctactggaatggtccgattagcgcgctgaaagccaatatggacgatatcagcaagcgctataacaaagacgtgatagtggtggaagccgcttacgcctataccctggaaaactgcgacaacgccgaaaatagtttccaggcgaaagaggataaggatggcggttatcctgccaccgtacaggggcaatataattatattcacgacttaatgcaggccgttgcggacgtaccggaccaccgcggtaaaggtattttttattgggagccgacgtggattgccgtaccgggaaatacctgggcgacgcctgccggaatgaaatatatccatgatgaatggaaagaggggaatgcccgggaaaatcaggcgctgtttgattgccagggaaaagcattgccgtcgatgaaggtattcaattaattattcagctttacacttcaggatgtttattatgaaaaaatttgcgcctttgagtccgaaggtcaatgcgctattgcatggcgccgactataaccccgagcagtgggagaactatcccgatattatcgataaagatattgccatgatgcagcaggcaaaatgtaatgtcatgtcggtagggatatttagctgggcgaaacttgaacctcaggaaggcgtatttgagtttggctggttggacagtatcctggataaactctatgccgccggcattcatgtctttctcgcgaccccaagcggcgcgcgcccggcctggatgtcgcagaaatatcctcaggtcctgcgcgtcggtcgcgatcgggtgcctgcgctgcacggtggacgtcataaccactgtatgtcgtcgccggtctaccgtgataaaaccctgaaaataaattccctgctggcggagcgctactcgcagcatcccgcggtgctgggctggcatatctccaatgaatacggaggagagtgccactgtagcctgtgccaggagcgtttccgcgactggctgaaagcgcgctatgaaacgctggataacctcaatcacgcctggtggagcaccttctggagccacacctacagcgactggtcgcagatcgaatctccggccccgcagggggaagtctccattcatggtctgaacctggactggcatcgcttcaataccgctcaggtgacggacttctgccgccacgaaattgcgccgctgaaagcggcgaatgctgcgctgccggtaacaaccaactttatggagtatttctacgattacgactactggcagctggcgcaggtgctggactttatctcatgggacagctaccccatgtggcaccgtgataaagatgaaaccacgctggcctgctacaccgccatgtatcatgacatgatgcgcagcctgaagggcggcaaaccgtttgtattaatggaatccaccccgagcgcgaccaactggcagccgaccagtaagctgaagaaaccgggaatgcatattctctcttctctgcaggcggtggcgcacggcgcggattcggtgcagtacttccagtggcgtaagagccgcggttcggttgagaagtttcatggcgcgattatcgatcatgtcggtcatctggatacgcgcgtgggtcgtgaagtgacggcgctcggcgagatgctaagccagctgccgggcgtcgtgggctgccggacggatgcgaaagtggcgattatcttcgaccagcaaaaccgctgggcgctggatgatgcacaggggccgcgaaatctcggcatggagtatgaaaataccgtcaacgaacattatcgtccgttctgggagcaggggattgcggttgatgttatcgatgctgacgttgacctgagtccttatcaactggtcattgcgccaatgctgtatatggttcgtgagggatttgccgaacgcgccgaagcgtttgtggctaacggtggccatttagttacaacatactggacgggtattgttaacgaatccgacctttgccatctcggcggtttcccgggcccgctgcgtaaactgctgggcatttgggcggaagagattgactgcctgaacgacggcgaacgcaacctggtacaggggctggcgggtaatgaagggggcctgcagggaccgtatcaggtacgccatctgtgtgaactgattcatgccgaaatggcacagccgctggcgacctaccgcgatgatttttacgcgggacgaccggcggttaccgtcaatcacgtgggtaaaggtaaggcctggcacgtcgcttcgcgcaacgatctggctttccagcgggacttcttcaccgccataagtaaagagctgtcgctgccgcgtgcggtggcggccgatttcccgccgggcgtggtggcgaccgcacggacggacggtgaaaccacctacgtattcctgcaaaactacagcgcgcagcagcagcaggtgaccttaccgcagggctatcaggacagcctcaccggcacggcactgaacgcgccgttgaccttaaaagcgtgggattgccgtatcctcagtcgtcacgcgtaatttttctctatccacgcctgctcgcaagagcaggcgtttttttatctgcttatcaggagtctattatggtgagtttaaaatcctttctgaattacttctcccagtctcgtccggcggtaacgttaagcccggcggaacaacaacagattgaacgtttaattcaggcttttggcggcgaggcgaatattatcaacgttgacgcctgtatcacccgcttacgcgtcacggtgaataatctgtcgattgttgactctcaggcactacagcagcagggagcgcttggcgttattatccttgggcagcaggtgcatgctattttcggtaaacagtcggatgctttgcgtcaattacttgacgaacactttgccagccgtaaataaaataaaacgggataacgcaataatgagttatcccgaaaagaaaacaaagcattcaatggcaataatgattaccggagggtaattaacgaccttacagctggagataaaacagttaaatgacggctaccaccaggcctcgacctgtacaccaaagttccacgtattattggcagtttgatcttcgaacggtttaccgttttcagagtcattcagatacgaagcgaaaatgcgcagttccgggcgagacataaagtcagggccatcggccaggcccagcgcgatggtatatttctcaccggcctgcttataatcagtattgttcttgtagctatctttttggtaaaagccgcccacttcgccaatcaggcgcacgtattcggtgaactgatactgcccacgagccaccagcgacagcatgcgcgttttatccgtgtaatcggtgatgttgtccgcggagccccaggtgagaacgtggttaatggagaacttttcggtaatcggaattaaaccggtattaatcacgcggtatccggtggcgtcattgacgtagttccacatgtcgtaccagccgccgccctgggaaaccatgttctgcgccagccctttgttggcgtactgcagaaccgttttgttgtaaccacccagcatatcctggctgatttcaccggtcagcatgacgccgttttcagcatcgtatagaccaccgtaggagtcctgctttttagtggtattcggcatcgcgtagtcgataccaaattcggtccacgaaccggcccaaggcttccagcctgcgtagcgcaggtctaggtagttaatgttgacgttgctgtcgccatcgacgcggtagtcgacgtcattggcatcgccgcggatccaggcaaatgaaacggcccccgggccgagcgtatagttttcgatcccggcaccggatccggaaatgttccagtatttggtatcaatgatgtggagatcgtggcgctggtagtagcgtttaccgccccaaatgaccgcgttcggatcgccggggaccagccctttgatttgcaggttgagctggcgcaggccgaattgggcatcatcatcgagcgtggtttcgttatcgttagaaccgtcagaaaccatgctgaccatgctatcaagatagaagctaacgtcattcttcttatagacctctgatcccagctccagctcgccgtaggtatcggactcattacccagacggccaattttgtttttttgccattcggcctgactaccgtcgccggagaccccaaccccggcgcgcatatagccatgaaaatcgatacccggaagcgtggcggaagcagcaaacacggatggtgaaatcagcgcagcggccaacgcagcggagagtgtgcgcagcgtagtgttcatgtctatcctcttattgttttgtattacgttcacataaccgatgtcataaaatgcctaaaccagaattcaggcaattgaatgatcgctatattgtgattaactgcaaataaattggcgggttttgttacgactagtgagtctattcacaatttgttgtattgtgagcgtaatactttttgtgatgattgtggttcgggggacgcggcgatgagcgttttttcacattgcccctgttacaatccagggataacaacataaggaaccggactatgaagtctaaaagcgcgaccttagaagacgttgctcgccatgcgggcgtctcctatcagaccgtgtccagggtactcaacaaatctgctaatgtatccaaagccacacgcagcaaggtggagaaatccatcgaggcgctgcgctatgtcccaaaccgcctggcgcagcagctggtaggaaagcaaagccgcaccgtgggcctggtcaccatctccctcgcattgcacgcgccttctcaggtggctgctgcggtaaaacgctatgcgaatgtggaaggctatcaggtgctcatctctatgattgatgagagcgtcaaccaaagtattcaagattccattaatgaacttaagtctcagctggtagataaggtcatcatcaacgtgccgctggagactgaactggctcaaaaaattgccgctgataacgatgatatcgtctgtctgtttttagatgttgacccctacagctccgtgtttaacgtttcgtttaacccggctgacggcacccgggccagcgtcaaatatctctatgaaatggggcatcgggagatcgcgctgctagctggcccggaaagctcggtatcggccaaactgcgtctgaaaagctggattgagacccttgagggatatggcctgcagccggtcacggtgattcgcggtaactgggatgcgcagagcggttatgccggcgcgctgcaaatgctgcgggagacgccaaactttaccgccgttctggtgggtaacgatcagatggcgctgggcgtactgagcgcgtttcaccagcaccaggtgccgattccgggggaaaaatcggttattggttatgatgacacctatgagagttcgttcttttacccggcgctcaccaccgtttcgctggatcttgatttacaaggaaaagaggccgtccggcgccttctcgatagcggcgatcacgagacatctcatacttcctctatccttccggctcgtctggtcgtgcgccactctaccggaccgaaaacggagccgggcaaaaacctgcagtctattgccgaacagctcagagcgctggcgcatcagcttaatccttaatccgcaacgggcggcctgcgccgccctttagccccttccattctcagggttgatctttgtattcacccggcgtaccatgatgttatgttataacgtaatgattgaggtcgctatgaaacccaatattcatccgcattatcgtacggtggtttttcacgataccagcgccaacgaatacttcaaagtcggatcaacgatccgtaccgagcgcgaaattgagctggaaggcgagacgtatccctacgtaacgctcgatgtctcctccaaatcgcatccgtattacaccggcaaacagaaggccttcaacaatgaaggcagcaccgcgcgtttccgccagcgcttcggcggttttattgatgcgaaaaggagtaaataatgcaggtgctcaactcattgcgtagcgcgaaacagcgccacccggattgccagatcgtcaagcgtaaaggacggctgtacgttatctgcaaaagtaatcctcgctttaaggccgtccaggggcgcaagaagagacgttaacggaagctctccagcgttcgtaactgccggccgtcggcgctaaagttgtcggcggccagccactgctgcattgccttgtcaatatgcggccactcggaatcgataatcgaaaaccagtcggtatcgcggttgtggccctttatcaccagcgcctgacgaaaacgcccctcatactgaaatcccagccgcagcgccgcccggcgtgaaggctcgttcaaactgttgcatttccactcgtagcgacgatagccgagcgttgcaaaaatataatgcatcagcagccattgggcctcggtggccatcgccgtccggcttagtaaaggcgagaagtgaacgtggccgacttcaacaacgccatttttagcatcgattctcatcagcgccagtgagccaacgggctggtctgtccgttgatctatcacggcaaagtggatgggatcggcctgcccggaaacgtgctctatccacgcgcggtattcctctacgctgttatccggctcacgcagcagccacgtccagcttcgggtgtccggggccagccgatgggcgtcaaacagcgcaccggcatgcgtggagcgcaatggctcaaggcggcaaaggcgaccttgcagattcaacctttcaggatgcggacggggctgccagtcgggcagggctgcgccaacgggttgatcgaattgattaagatggctcatgaggttttcctttggcaggtgaatgctgcgagattaggcgcttgttggttccataaaaagagccacaggagtatgtttttagggtgccacgaggagcgatgatgaatattccggatgatgctttttttgctttactggagcaggccctgcgcggcaggggaggtggaaccctgcagcgtacgctctatcagacactacgcgaggcgattttacagggggcgctggcaggtgatagccgtttacccggctcgcgcgccatggcccagcgtctggggctgtcgcgcaacaccgtcaacggcgcgctggagcagctggcgatagaggggtatttattacgtagccgccaggggacgtccgtcgcgcctttaggaactcagggagagggggacgttgaggcgcgccatattgtgctccctgaatacttacagggattaccagcggcaatccatcgtgattcacccacgctgctctttacgccgggaatgcctgcggttaactactttccgctttccatctggcgccggctcctggatcgcgtactgcgtgaagagggaagcgcattattgggctacggcgatgcgcagggagagctcgtactgcgaaaaaccattgcccgccaccttgcgctctcgcgggggatccgctgtgaagccagccagattgtgattacggaaggtgcgctggaaggcgtcgatttatgcacgcatttgctgagcgtcgctggcgatacggcatgggtagaagaccccggctatccgggagcaaaaagcatctttctcaaatccggacttcatattgagggcgtgccggttgatcatgaagggatgcgttttgatagtcataatgatagtgaagcgccgcgattgatctttacttcaccttcccatcaatacccctgcggggcagtgatgagcgccgggaggcgactggcgctactggagtatgcccgccggcatgattcatggattattgaagatgattacgacagcgagtttcgctacagcggtgagcccattccggccatgctggggatggccaggcaggcgccggtggtttatctggggacattcagcaaaacgctatttccggcgctgcgcattggctttatggtgatgcctcccgcgctggcggaggccgcacgtggcgccattggttcgctattacgcggcggccatcgggccgaacagagggcgctggcgttgttcattgaggaggggcactacgcacgtcatttagccgccatgcgccgtttataccgcaaacgtcagcagcagctgcgggagattctggctcaagagctcaggcatccttatgaactgtttggcggcgaggggggcctgcacctgaccgttgctatcgacaacgtggatgacctggcgattgtgcagcaggcccggcggtttcagctggcacccggggcgttaagccgtttttacctggatgtaaaaacggcgcgaagcggctttgttctgggctacggtaatacgtccgcctcgcattttagggccgcggtacgcacgctgaaccgtcttattgcgctggaccgacgcgggtaagagaaaatacatcgtaaaaggagagttcgcctttggtggcgatcattttttgtagctgagccttttgttcgccgccgacgcgtggcgattgcaggatgcgttcaagcagctgctcagggacaaatcgggtgttgtaccactcaccgttgtagcacacgcggaaatcaagaacgtcaatatcttcataacgatagcgcgggtagacgtcgaagaagaagaaaccgtttagcagaacaaataacacaattaacagccagacagaatctaccagcgtttcggaacgtagcatcacaataagcgtggccaggaaagccgcgtacatggcgacaaaaagccatggatggttgcgaataaagctaatgctaaagcgcggacggttgtcgcgcttctctttcacattaagctcatcaatggtgctcttcagcagcagctgtatttctgtcatcttattccccaaattctgccatgagcccgtatccaggcgtgacaaaccgggctcagcctgaaggctattttatgttgcgtaaatccatggggaaagtaacagattggttgcagaaaagcataacagttaccgtttttcgctctccagcattttaattatccgtgccgggtttccgccgacgacggcgttggccggcacattttttactacgacggcccccgacgccaccacggcattatcgccgatagtgacgcctggattaatcactgcccggccgccaatccacacattgtggccaatggtgacgggttttccgtactcttgaccactgttgcggtcgacaggggcaaggggatgcgtggcggtataaatatgcacgcccggcgccagcatgcagttatcgccaatatgaattggacagacgtcaagcatgacgcaatcaaagttagcgtagaaatttttaccgaggaagatattgtagccatagtcacagcgaaatgtgggttcgatgtacgcgtcactcgcgtgcccaagcagttcagaaagtaatgcgtttcttaattcactttcttaaggcgccgaatgattgtagcggtgcagcagctgtctggcccgcagacgatcggctttcaacgtggcgtcacctgccagatacagttcgccggcaatcattttttgtttctcttcactcatggaggctttccttatttccttatcgttaggccgccatagtataaaaaagaaaccggtttcatattcgcgttaagccaacatctgtgagcactgtcacacttattatcatcacgagagaggggcgttttcggcacgagatgtatgactttcatttgaagtaaactagcggataaatttccagactgaaggggggatcttgtcatacagtttattcatcgtcagctctgcaagacgatgatcggccgcagagtaaaataccgccagttcattatcggaaagttcatatttatttttttcaattacgcgctccagcgtatcaattgtctgacagcgtcgtaaacgcatcaaatagtctattttggttaatgttttatcagacataaattcaccttttgattgtaataatactaacaagaaagactggccgggttttcccgactggcgttgacaaagcagcggaataaccgattgccagatttacgccatttctgcagatctgcgctgttaatgccgtagttgctgaacaagacgaaagtgtcatccagatattcgtcaatctgggtaatcagcttattatcctctgcgtacttaattttataattaagtgcaaacgcggcaatgtgctcgatcaattcattaagttgaagattgacagccgaggttggatcattaacccagccgtggttgctctcttccaggtttgcaagacagtcatgatacagggtttcgcagagaaatttaagctgcgcaatatcatgtctttttggcgagtattcgtccataacgcatccccttttgagtggtttaaacgacgattatcgacaccgttgtgggatgaacacgactaacagacctgacacatacattgtaatcttgctgtttaactataatccactcttaaaaagatttcatcgtgctattacgaaaaattacaattatcagcgtccttttatcttcaatgactcggactttattatatcgtgccgttaccccgatcggaaaaaacgaatactgaccttatatttcatcaggttagccgacgcgtttagccgttatagagagacaaccatacacaaaatcagtgattaagaatattctgagttaggggcgcaggaaagaaaattgtggaaaaaaaatggagataagcaccgcgactcatcattaaatattatatctcagcttataaattagacaataacaatccgtgcgttttaacgaggaacaaaagaaaagggccgcaaatgcggccctgagaggagagattaatgatgctcaaccggatggctgtgctcaatatcctcatttttcttactaaagcggcggcgaaccaccacgaagaacaccggcacgaagaaaatcgccagcaccgtcgcggtcaccatcccacccattacgccagtaccgacggcgttctgcgcgccggagcctgcgccggagctgataaccagcggcatgaccccaaggatgaacgccagcgaggtcatcagaatcggacgcagacgcatacgaacggcttccagcgtggcttcgatcaggcctttgccctctttatccatcaggtccttggcgaattcaacgataagtatcgcgttcttcgccgacaggccgatggtggtcagcagaccaacctggaagtagacgtcgttggttaatccacggaaggtagccgccagcagcgcacccacaacccccagcggaacaaccagcatgaccgagaacggaatcgaccagctttcatacagcgccgccaggcacaggaagacgacaatcagcgagatagcgtacagcgctggtgcctggttgcctgacaaccgttcctgataagacataccggtccagtcatagccaatacccgcaggcagtttacccgccagctcttccatcaggttcatcgcttcaccggtactcttgcccggtgtcgcctggccgaggatttccattgatggcaaaccgttgtaacgctccagacgcggcgagccgtattcccagcgtgaagtcgagaaggcggagaagggcaccatctgtccatcgctgccgcgtacgtaccagttgccgatatcttccggcagcatacggtatttcgcttcagacatgatatacactttcttcacgcgaccgcggtcaatgaagtcgttgacgtagctaccaccccatgctgcgccaagcgtcgtgttaatgtcgctgatagacacgccgagagcctgcgctttttcctgatcgatatccactttgaactgcggagtatcttccagtccgtttggacgcacgccggttaagacgtcaggatgctgcgcgaccataccaaagagctggttacgtgcctgggtcagtttttcatggcccagtcccgcctggtcgatcagctggaagtcaaagcccgttgcggtacccagttcaacaattgccggcaggttaaaggcgaagaccattgcgtctttaatctgcgagaaataccccattgcgcgaccggtaatcgcctcaactttgttctcttcgcccggacgctggctccagtccttcagagaaacgaacgcgataccggtgttttgcccacgacccgcgaaaccaaagccgtttacggcgaataccgattcaacgttgtttttctctttggtgagatagtagtcggtcatctcatccagaactttctgggtacgctcctgagttgcgccagcaggcagctgcgccatgctcaggaagacgccctggtcttcgtccggcaggaacgaacttggcagacgaacgaacagccaggccatgccgacaacgatgatcaggtacagcaccagataacgaccggtactgcgcaggatattgcctacgctatcggtgtagtgatgcgtgctcttatcgaacatgcggttaaaccaaccgaagaagccggtggtggcgccatggctgcctttctggatgggtttcagcatcgtggcgcagagcgccggggtcagaatcagtgccaccagtaccgacagcgccatcgcggaaacgatagtgatcgagaactgacggtaaatcgcaccggtagaaccgccgaagaaggccatcgggataaataccgcggaaagcaccatcgcgatacccaccagcgcgccctgaatctggcccattgatttacgcgtggcttccttcggcggtagcccttcttcggccattacacgctcgacgttttctaccaccacgatggcgtcatccacgagcaggcctatggcgagcaccataccaaacatggtgagggtgtttatcgagaagccgaacagcgcgaggatagcgaacgtccccagcagtacaaccggcacggcgatagtcggaatcagcgttgcgcggaagttctgcaggaacaggtacatcaccaggaacaccagaatgatggcttcaaccagcgttttcaccacttcgtgaatggagatctgcacgaagggggtggtgtcatacgggtaaacaatcttcaggcctgacgggaagaaaggttccattttcttcagttcggcacgaatggcgttggcggtatccagcgcgttcgcgccggtcgcgagcttaatacccagaccggacgcgggctgaccgttaaacttcgcaacgacgtcgtagctttcgccacccagctcaatcttcgcgacatcgcgcagacgcacctgggaaccatcctggttaaccttcagcagaatgttgccgaactcttcagtattggtcagacgggtctgcgccacgatggaggcgttcagctgctgacctttcaccggtggagtaccgcctaactgtccggctgcgacctgggcgttctgcgctttcagggcgctgatcacgtcaaccggcgtcagctggaagttattaagcttgttcggatccatccagatacgcatcgcgtactgggaaccgaacagctgcacgtcaccgacgccgctggtacggctaatcgaatccttcatgttggcggcaacatagtcagaaatgtcatcctgattcatggtgccgttggtattgataacgccgacaaccatcaggaagctgctggatgccttttcaacgctaataccctgctgctgaacttcttgcggcagcagcggcgttgccagcgccagcttgttctgtacctgtacctgggcgatatccggatcggtaccggattcaaaggtgagggtgatggttgctgtaccggtggagtcgccatttgaagacatgtacatcaggtgatcgataccgttcatgttctgttcgataacctgggtcacggtgttctgcacggtttcggcatcggcaccggggtacatggctgtaatggaaattgccggcggcgcaatcgtcggatattgcgctatcggcaacttgaggatcgataaccccccagccagcatgatgataatggcgatcacccacgcaaatatggggcgatcgataaagaaattaggcatgtcttaacggctcctgtttaagttaagacttgggttgttctgactgagcgttgcctgcggcttgctgtttatcgtcagaaacgacttcctgcgctttaacctgcacgccaggtctgactttttgcagaccggtgatgatgacgcgatcgcccgttttcagcccttcggtgaccagccatttatcaccaatagcctgagtggcggtaatctggcgaacttcgactttatcaccttcgccgacgaccatcgcgctggcatcgccgcgcggggtgcgggttacgccctgctgaggaaccagcagcgcatccgggttgacgccttcttccagacgcgcgcggacgaacatccccggcagcagagtgtgatccgggttcgggaaaatggcgcgcagcgtgatagaaccggtggtctgatcaacggtgacgtcagaaaactccagcgtaccgttctgcgggtatttcagaccgtcgttcgtcaccagctcaaccttcgctttgccgttttcctgctgcagcttgccgttggccagctcttgtttcagacgcaggaaatcgttgctcgattgcgtcacgtcaacatagataggatccagctgttgcacggtcgccagggcggtggtttggccgttttgcaccagagcaccttccgtgaccgcggatttaccaatgcggcctgagattggcgaggtgactttggtgtaggccagattaatgcgcgcggtttcaaccgctgctttggcggcaaccacggcggcgttgctctgttgcgcggtcgcgacggcagtatcgtaatcctgttgactgatgtacttagtgcctaacagtttctgataacgtttaaccgtcagctgatccatatttgccgcggcctgcgctttggctaaatcgcctttcgcgctttcataagtggcctgataggtcgccggatcgatttgataaagagacacccctgcctggatatcgctcccttcggtgaagttacgtttaagaataatgccactgacctgaggacgaacttccgcaacgcgataggcgctggtacggcctggcagttcggtagtaatttgtagaggagcggatttgagcgtcacaataccgacttccggcatttgttgggctccttgctgagccggtttgtcgtcacatcctgttagcgctaagctgcctgagagcatcagaacgaccgccagaggcgttaaccctctgtttttgttcatatgtaaacctcgagtgtccaatttcaaattgttcagtggctcaatcgaccacaaacccactgctgtgtttctattatggtcatgctatggtacatacattcacaaatgtatgtaaacgtaacctctgtaaactcatcgacctatggcacgaaaaaccaaacaacaggcgcttgagacccggcaacatattctggatgttgctctgcgtctgttttcgcagcaaggcgtatcatccacctcgctggccgcaattgcaaaagaggccggtgtgacgaggggcgctatctattggcatttcaaaaataaatcagatttatttaatgaaatatgggtgctttcagaagccaacatcaacgatctcgaagttgagtatcgggcaaaattccccaacgatccactgtcagttgtcagagagatcttagtgtatatccttgaagcaacggtgacagaaaaacgcaggcgcttgatgatggaaatcattttccataaatgcgagttcgtcggagagatggtcacgctgcaagaagcgcagcgaagtttatgccttgagagctacgatcgtatcgagcagacattaaacgagtgcattgcggcgaagatgctgcccgccaatttactcacccggcgggcggcgattttaatgcgcagctatctttctggcctgatggagaactggctgctggcgcccaacgctttcgatctgcagcatgaagcgcgggcatatgtcgaaacgctgcttgaaatgtatcaattgtgcccctctctgcgcagttctgaaggcgcggaagcttaagtatcctcgcggacaaaaggggtatttttcctgctgtccgccgctattcgcgcgataacagaagtgctattcttcgcgctgcgacgatccccggtattctccggcttttgcaatcactcatgttaacactatgctgcatactatccgttggcgaaacgccatatccgcttttgttcttaccctgatgttttttatcggctgtattagcgttaacacggcgctggcggctgacttacctgaacgttccgaggtgcaaagccagctcacgacgctgaataagcaaaaagagctgaccccgcaggacaagctggttcagcaggacctgacccagaccctggaaaccctcgataaaatcgaacgcattaagtcggaaacgacgcagctgcgtcagcaggtggctcaggcgccagcgaaaatgaatcaggctatcgatagcctcaacgcgctaagcgatgttcccgatgatgaggcgacgcgtaaaacgctgagcacgttatcgctacgtcagctggaatcgcgcgtctctcagacgctggacgatttgcaaaacgcgcagaacgatctggcaacctataacagccagttagtctccctacaaacccagccggaacgtgtgcagaatgcgatgtactccgcttcgcagcagctgcagcagatccgtaaccgcctgaatggcacctcgacgggcgaggagacgctgcgtcctacccagcagagtttgctgctggcgcagcaggctctgctgaatgcgcagatagaccagcagcgcaaaagcctggaaggtaacacggtcctgcaggataccctgcaaaagcagcgtgattacatcaccgcctacagcaaccgtcttgaacaccagcttcagttattgcaggaagcggtgaatagcaagcgcctgacgctgacggaaaagacggctcaggaagcggtttccccggacgaaacggcgcgtattcaggcaaacccgctggtgaagcaggagctggagattaaccaccagcttagcgaaagactgatttcggcgacggaaaatggtaatcagctggttcagcgcaacatcaaagtgaagacctggctcgatcgcgctttgcaatccgagcgtgatataaaagagcagatttccgtgctgaaaggcagcctgctgctgtcgcgtatcctttatcagcagcagcaaacgctgccctctgcggaggagctgagcgatatgacgaaccgcatcgccgacctgcgcctcgaacagtttgaggttaaccagcagcgcgatgcgttgttccagagcgatgcgtacgtcgcgaagctggaggaagggcacagcagcgatgtcaatgccgaagtgcatagcgcgcttctcgaaatcgttgatatgcgccgggagctgctcgatcagttcaacaaacagctgggtaaccagctgatgatggccattaacctgcagatcaatcagcagcagttaatgagcgtgtcgaccaacctgaaagccattctgacgcagcagattttttgggtaaacagtaaccgtccgatggactgggagtgggttaaagccttcccggaagcgctgaaagggcagtttaaggcgatgaaaatcaccgtaaactgggaaaaagcctggcctgcggtatttatcgctttccttgccggcctgccgttgctgctgattgccggtctgattcgctggcgccttaactggctgaaagcgtatcaggcgaagctggcttcacaggtggggcaactgcgcaatgacactcagcttcacacgccgaaagcgattcttatcgatctgatccgcgcgctgcctgtggtgctggtgattctggccattggcctgattctgctgaccatgcagctgaatatcagcgatttgctgtgggcctatagtaagaagctggcgctgttctggctggtgtttggcctgtgctggaaggtgctggaaaaagacggcgtggcggtgcgccactttaatatgccgtcgcagttgaccagccactggcggcggcagattgtccgcgtcagccttgcgctgctgccgctcaatttctggtcggtgatgtcggagctgtcgccgctgcacctgatggatgacgtgctcgggcaatttgttattttcctcaacctgctgctgattgcggtgcttgttctgccgatgtgccgcgaaagctggcgtgataaagagtcccacagcctgcgccttatcaccgtcaccgtgctatcgattgtgcccatcgccctgatggtgctgacggcaaccggctacttctacacgacgctgcgtctggccggccgctggattgaaaccgtttacctggtgatgctgtggaacctgctgtaccagaccgttctgcgcggcctgagcgtggccgcccggcgtattgcctggcgccgtgcgctggcgcgtcgtcagcatctggttaaagagggtgctgaaggggccgaaccccaggaagaaccgacgattgccctggagcaggttaaccagcaaacgctgcgtattacgatgctggtgatgattgcgctgtttgccgtgctgttctgggcgatttggtccgatctgatcaccgtgttcgcctatctcgacagtattacgctgtggcattacaacggtacggaagccggcgtcagcgccgtgaaaagcgtcaccatgggcagcctgctgttcgcgattgtcgcgtcgatggtcgcctgggcgttaatccgcaacctgccgggcctgctggaagtgctggtgctatcgagactcaatatgcgccagggggcgtcgtatgcaattacgaccatccttaattacgccattattgttattggcgcgatgacggtatttggctcgttgggcgtttcgtgggacaaacttcagtggctggcggccgccctgtcggttggtttagggtttggcttacaggaaatcttcggtaactttgtttccggtctgattattctctttgagcgcccggtgcgtattggcgatacggtgaccattggtaccttctccggtaccgtcagcaaaatccgcattcgcgccacgacgatcaccgattttgaccgtaaagaggtcattatcccgaataaggccttcgtgacggaacgcttgatcaactggtcgctctccgacaccgtcacccgcgtggtcatccgccttggcgtggcctatggttccgacctggataaggttaaagaagtgctgctccaggccgcgcatgagcatccgaaagtgatgcaagagcccgcgccctcggtcttctttaccaccttcggcgccagcacgctcgatcatgaactgcgcctgtacgtgcgtgaacttcgcgatcgcagctatgcggtggatgagcttaaccgcgctatcgatcgtttgtgccgcgagaacaatattgacatcgcctttaaccagctggaggtgcatctgcgcaatgagaagggcgatgaagtgacagaggtgaagcgggataagggcgacgatgcctccccggcgataagctaagcataacggggcggtgggtatccgccccgcagatgttaatggctgagcgaggagagttcttcctggctcagaccggtcagttccatcaccatcttcggctccagcccgcaggcgagcattttcagggcaatgctgtgcgagatttctctacggccctcctgcaaaccttcctgcaaaccttcctgtctgccttcttttctaccttttttacggcctttctcttccagccattcggcaattgtcatcagtagctccttgtgcctgggcgactgcttcgccagctcgcgaatcaggggcccaggtttttccgaggttcccgcctgcagcatatagctgatgagggtattgatctggttttccgtcagatatccttgcgccagcagcgtaatcagcatcggttgcagttcggccagatcgcgctggcgaatatgcttttgcaacagttccagcatcgccatacgctggtggcggaggatatgattatctggcataacggtcaggtccaccagcggaaaatctccgccgtacagcgcgccggcaagctcaggaaggtcaaaaagctggagccagttgagcgtatgtggccaggggctgacggtgccgtgataaaacagaatcgggaccaccagcggcagcgtattgtggccggcatccaggtggcgctgcatggcggccagcgtatagcgcatcaggcgaaaagccatcagcttatccggcgagctttgatgttcaatcagcgcgtagatatatcccgcgccgtgctgcgtttgtagggagtagagaatgtcggagtagctggatcgcaggtcttcctcgataaagctgccggaagccagctgcagcgtattgagatcgcagatacttaaaaactgcgcgggaagataaagctgtaaaaaatcgcgagcgacctctttctgggccagcatttgacgaaaaatagcatcgtgcggcgtacgtgagaatctttccatgagcatctatccgttgtggtaaggggcaggcgacaactctgccacccccaaagatccgccaacagactactcctgtgcgttttgcgaggcctcttccgcactttttactttgttttcatagtctcgacggataatttccagcgcagctagcacggtttgcgcaggaactttattctcctcaagcagcataattaaatcgacggccagcttgacctcgtcaggggcattttccagcgacatacttcttcctcccgttagcgcgttaagcgggccagtctgttttcaattttttccagcgcgtcgcgacagcgggccaggcgcccggtataggcttcaacttcctttgccagccgctgttggtcatcaaggcttatggcttgcgccagccgtctttgtcggtcgttgcgcatggccagcaggcgccgttcatactcctgatgctgtagacgtcggcgctgccagcggctaagcgttggcgacgcgctatcccaggcgcgtaatgaccaggtcgccgtttcccggttaatcgcggcgatttgagcaacgagacgttccgccagccaggcgacctgcgcaagctgctggcgttcggccgcctgttttaacgccgtaaagccgtctctggcctcattgagataagcctgcatctgcgtgctgcgggtacggaacagctgacgatcgaagcgcgggctgagggtcgcgtgattggccatgggcgccacctgagcggccagctccgcaagctggttttccagtgaatgtaaaagccgggcggttttcaaataactcctccatcccctgataagcaactgtgctacattagcgttatcttcgtgataacgattcgcattatgccacgtattattttgatcatcattggctggctggcggtagcgctgggaacgctgggcgtgtttttaccgctactgccgacgacgccgtttatcctgcttgccgcctggtgctttgcgcgctcgtcgccgcgctttcaccactggcttttgtatcgctcatggtttggcggctacctgcgccactggcagaaataccgcgccatgccgccgggcgcgaagccgcgggcggtcgcgatgattttgctgacctttgccatttcgctgtggctggttaatcttacctgggtgcgcatcttgctgctgatcattctgacctgtctgctgatatttatgtggcgcattccggtggttgatgcaaagcaacaaaagcactgatgcgcaataatgatggttgcaattgtcgctgacagccagtaaattctggcgttttcgagcgcgggtaagcctggtcaaaggttaaacaaaagtttctttggcccatttggcatgcccgtgagtaacaccgttttaatcaggcatacacttatgaccgcaacagcacagcagcttgaatatctgaagaacagcatccaaagcatccaggactatccgaaacctggcatccttttccgtgatgtcaccagcttgctggaagacccgaaggcctacgcgctcagcattgagctgctggccgagcgttataaagacgcggggattaccaaagtggtgggcaccgaggcgcgtggcttcttatttggcgcaccggttgcgctggcgctgggcgtaggctttgttccggtacgcaagccgcgtaagctgccgcgtgaaactatcgcagaaagctacgagcttgagtacggcaccgatcagctggaaatccatgtcgatgcgatcaaagaaggcgataaagtcctggtggttgacgatctgctggcaaccggcggcaccattgacgccaccgtgaagcttattcgtcgcctgggcggtgaagtgcacgatgcggcctttattattaatctgttcgatctgggcggcgagcagcgcctggaaaaactgggaatcaactgctatagcctggtccctttcccgggccactaagcaaatcccgccacatagcctcgctgattgagcggggctgtgatagcatgacccctcgtgatttcaccttccagcgtttcagagccagcccatgagttatcaggtcttagcccgtaaatggcgcccacaaacctttgctgacgtcgtcggccaggaacatgtgctgaccgcactggcgaacggcttgtcgttagggcgcattcaccacgcatatcttttttccggtacccgcggagtcggtaaaacctctatcgcgcgcctgttggcaaaaggattaaactgcgaaaccggcattaccgccacgccgtgcggcgtctgcgataactgccgtgaaatagaacaggggcgctttgtcgatctgattgagatcgatgccgcctcgcgcaccaaagtcgaagatacccgcgatctgctggataacgtccagtacgcgccggcccgcggtcgcttcaaggtctatctgatcgatgaagtccatatgctttcgcgccacagcttcaacgcgttgttaaaaacgctggaggagccgccggcgcacgttaaatttctgctggcgacgaccgatccgcagaagctgccggtgactattctttcccgctgcctgcagttccatcttaaggcgctggacgtcgagcagattcgccatcagctggagcatattctcggcgccgagcagatcgcttttgaaccgcgcgcgctgcagctgctgtcgcgcgcggcggacggtagcctgcgcgatgcgttaagcctgaccgatcaggccattgccagcggcgacggtcgcctgacggctgaatccgtcagcaccatgctcggcacccttgacgacgatcaggcgctttcgctgattgaggcgctggtggctgccgacggcgagcgggtcatggccggcgtcaatgaggctgccgcccgcggcgtggagtgggaggccttgctggtggagatgcaaagcctgctgcaccgtattgcgatggttcagctctcgccgtcggcgctgggagcggatatggccgcgattgagctgcgcatgcgcgagctggcgcggacggtgccgccaaccgatgttcagctgtactatcaaacgctactgattggccgcaaagagctcccgtacgccccggacagacgaatgggcgtcgagatgacgcttctgcgtgcgctggctttccatccgcgtatgccgctgccggaaccggaggcgccgccggtgcaggctattcaggccgcaccggcccagcaggctgccccggcatccgcgccgtcgtcgccgccgccgaatttgccgcagaccaccagccaggtgctggcggcccgcagccagctgcagcgtagccagggagcgcccaccccaaaaaagagtgaaccggcagccgcttcccgcgcgcggccggtgaataacgctgcgctggaacgactgagttcaattaccgaacgcgtacaggcgcgtccggcggcggctgcgctggagaaagcgccggcgaaaaaggaagcctatcgctggaaatcgacgacggttgttgaagccgtaaaagaagaagtggcgacgccgaaggcgctgaaaaaagcgctggagcatgaaaaaacgccggaactggcggcaaagctggcagtcgaagcggtcgagcgcgatagctgggcggcggaagtcagccggcttgcggtacccaaactggtggagcaggtcgccctgaacgcctggaaagagcaggagggcaatcgcgtctgcctgcatctgcgtccgagccagcgtcacctgaattcggcgggcgcgcagcaaaagctggcggaagcgctcggtattttgtacggtacgccggttgaattgaccatcgtggaagatgataatcccgcgatgcgcacgccgcttgagtggcggcaggcaatttatgaagaaaagctcgcgcaggcgcgtgaagcgattattgcggataataacattcagacgctgcgtcgattcttcgatgcggacctggatgaagagagtattcgccccatttgattgcaagtctgacttgcggtcagcatccttaacgatgacttactgagagagaagcctatgtttggtggaaaaggcggtctgggtaacctgatgaagcaggcccagcagatgcaagaaaaaatgcagcagatgcaggaagaagtggcccgactggaagtgaccggtgaatccggcgctggcctggtaaaagtcaccatcaacggcgcgcacaactgccgtcgcgttgagatcgacccgagcctgctggaagacgacaaagagatgctggaagatctggtggctgccgcgtttaacgacgccgcccgccgcatcgaagagacgcagaaagaaaaaatggcgtccgtgtccgccggtatgcagctgccgccaggctttaagatgccgttctgatgcagaccagtccgctgttaacgcagcttatggaagcactgcgctgcctgccgggtgtcggcccgaagtcggcgcagcgcatggcgtttaccctgctgcagcgcgaccgcagcggcggaatgcgcctggcgcaggcgctaacgcgcgcgatgtcggaaatcggccactgcgccgattgccgtaccttcaccgagcaggaggtgtgcaatatttgcagcaaccctcggcgcaaggaaaacggccagatctgcgtggtagagagcccagcggatatctacgctatcgagcagaccgggcagttttccggtcgctactttgtgctgatgggccacctgtcgccgcttgacggtatcgggccggatgacattgggctcgatcgtctggaacagcgtctgcgtgacgaatcgatgcaggaagtgatcctcgcgaccaacccaacggtagaaggggaggcgacggccaattatatcgccgagctctgcgcgcagtatggcgtagacgcgagccgtatcgcccatggcgtaccggtcggcggcgagctggagatggttgacggcacgacgctatcccactcgctcgccgggcggcataagattcgtttttaatcaaacggaggcgcttttcggggcctccgcttgaaaacttctccctctgtccccatctcaccctcaacggtttttttaccattaacaatggcattgttgaggttgatttagatgaaaggacaagaaactcgtggttttcagtcagaggtcaagcagcttctgcacctgatgatccattctctttattccaataaagaaattttcctgcgtgagctgatttccaacgcctccgatgcggccgacaagctgcgcttccgcgcgctgtcccagccggatctgtacgaaggcgacggcgaactgcgcgtgcgtgtttcatttgataaagacaaccgcaccctgaccatcgccgataacggcattggtatgaatcgcgatgaggtcatcgaccatctcggcaccatcgccaagtccggcaccaaagcgttccttgagtccatgggctctgaccaggcgaaagacagccagctgattggccagttcggcgtgggcttctattcggcgtttattgttgccgataaagttaccgtccgtacccgcgcggcgggcgacagcgccgaaaacggcgtcttctgggaatccgctggcgaaggcgaatataccgttgccgacattaacaaagccgatcgcggtaccgagatcacgctgcacctgcgcgaaggcgaggacgatttcctcaacgactggcgcgtgcgttcgatcatcagcaaatactccgatcacattgcgctgccggtggaaattgaaaagcgcgaagacgttgacggcgaaaccgtcattagctgggagaaaattaacaaagcccaggcgctgtggacgcgcaataagtcggaaatcaaagacgacgagtacaacgagttttataagcacattgcccacgattacagcgatccgctgacctggagccacaaccgcgttgaaggtaagcaggagtacaccagcctgctgtatatcccgtcgcaggcgccgtgggatatgtggaatcgcgatcataaacatggcctgaagctgtacgtgcagcgcgtcttcatcatggatgacgccgagcagtttatgccgaactacctgcgtttcgtccgcggcctggtcgactctaacgatctgccgctgaacgtgtcacgtgaaatccttcaggacagcagcgtcacccgcaatctgcgtaccgcgctgagcaaacgcgccctgcagatgctggaaaaactggcgaaagacgacgcggaaaaatatcagaccttctggcagcagtttggcctcgtgctgaaagaggggccggcggaagatcaggccaaccagcaggccatcgccaaactgctgcgtttcgccagcacccataccgactccgccgcgcagaccgtgtcgctggaagagtacgtctcccgcatgaaagaagggcaggagaagatttactacattaccgccgacagctacgccgccgcgaaaagcagcccgcatctggaactgctgcgtaagaaaggcattgaagtgctgctgctttccgatcgcatcgacgagtggatgatgagctatctgaccgagttcgacggtaagccgttccagtcggtggcgaaagccgatgagtcgctggataagctgacggacgaagtggatgaaactactaaagaagccgagaaggcgctggagccgttcgttgagcgtgccaaaacgctgctcggcgaccgggtgaaagaggttcgtctgacccatcgtctgaccgatacgccggccatcgtcaccaccgacgcggatgaaatgagcacccagatggcaaaactgtttgccgctgcgggccaggccgcgccggaagtgaagtacatctttgaactgaacccgctgcatccgctggtaaaacgcgcggcggatacccaggatgatgcgcagttcggcgagtgggttgagctgctgctcgatcaggcgctgctggccgagcgcggtacgctggaagatccgaaccagtttatccgccgcatgaaccagctgctggcgtcgtaatctttaccctcactctacccctctcccgctgggagagggccggggtgagggcatcaaaccgcactctacgtaaaatatctcaccattaaccgtttcagccgccccgccttccttgagccatccgcgttctggtggtatggtttagcgttttttgaaaaattgaatcaacttttgaggggattttcgtaatgcgtattattctgcttggcgctccgggcgcgggtaaaggaactcaggctcagttcatcatggagaaatacggtattccgcaaatctccaccggcgacatgctgcgtgccgcggtgaagtcaggctccgagctgggcaaacaggcgaaagatattatggacgccggtaagctggtcaccgacgaactggttatcgccctggtcaaagagcgtattactcaggaagattgccgcaacggttttctgctggacggcttcccgcgcaccattccgcaggctgacgccatgaaagaagcgggtatcaccgtggattacgtgctggaattcgatgttcctgacgaactgatcgttgaccgcatcatcgggcgtcgcgttcacgcagcttccggccgcgtttaccacatcaaatttaatccgccgaaagttgaaggcaaagacgacgtgaccggcgaagagctgaccacccgtaaagacgaccaggaagagaccgtgcgtaagcgtctggttgaatatcatcagatgacggctccgctgatcggctactatcagaaagaagccgaagcgggcaatacccagtacgcgaaagtcgatggcaccaaagcggtggccgacgttcgcgttgaactggaaaaaatcctcggttaattccgttagttctcatcccgccgcggcggggtgagaactcctctcattttacctttttctatgattggttccgtttagcgccatttcagctacaattgtcagcgattcaaatggttaagaggcggtaatgcatcagacgaaaacaggtatcttattagccaatttaggcactcccgatgcgcccacgcccgacgcggtaaagcgctatctacgacagtttcttagcgatcggcgcgtggtggatacctcccgtctactgtggtggccgctgctgcgcggcgtgatactgcccctgcgcgcccccagggtcgccaagctctatcagtccatctggatggaagatggctcgccgctgatggtctatagccagcagcagcggcaggcgctggccgcgcggcttccggatacgccggtggcgctggggatgagctacggttcgccgtcgctggagagcgcggttgatgaactgctggagcagggcgtggatcacatcgtggtgctaccgctctatccgcagtactcctgctccaccgtggcggcggtctgggatgaactagggcgtatccttgccaaaaagcgcgccatccccggcatctcttttattcgcgactacgccgatgacgtggactatattcacgcgctggccgccagcgtgcgggcatcctttgcggtgcacggtgagccagatttactgctgctctcctatcatggcatcccgcagcggtacgcccagcaaggggatacctatcctcagcgctgtcgcgataccacccgtgagctggtttcagccctggggctgccgcctgagcgggtgatgatgacgttccagtcgcgctttggtcgtgagccctggctgacgccctacaccgacgaaacgctgaaaatgctcggtgagaaaggggtgaagcatattcaggttatctgccccggcttttccgccgattgcctggagacgctggaggagatcgcggtgcagaaccgggaaatcttcctcgaagccggcggccagcaatatgagtacattccggcgcttaatgcggacaccgcgcatattgaaatgatggtcaacctgacggcgaaatatcgctgatcgcgcgtgcggcggggagtatgctactattccccgcttgttcactgtcaataaatcgccactatgaaatttcccggtaaacgcaaatccaaacactattttcccgtcaacgctcgcgatccgctgctgcagcaaattcagccggacaatgagtctaacgtcgcctgggtggtcggcatcgatcaaaccctggttgatatcgaagcgaaagtggatgaggcgtttatcgtacgctacggcctgagcgccgggcattcgctggtgattgaagacgatgtcgccgaagcgctgtatcaggaactggtccgcaacgacctgattacccaccagtttgccggcggcaccatcggtaacaccatgcacaactactcggtgctggcggatgaccgttcggttctgcttggcgtcatgtgcagcaatattgaaatcggcggctacgcctaccgctacctgtgcaacacctccagccgtaccgatctgaactacctgcagggggtggatggggcgattgggcgctgctttacgctgattagcgactccggcgagcgcacctttgcgatcagccccgggcatatgaacaagctccgtccggaaagcattccggagagcgtcatcgccggcgcctccgcgctggtgctgacctcctatctcgtgcgctgcaagccgggcgagccgatgccggacgcgacgatgcaggccatcgcatatgcgaaaaagcacgatgtaccggtggtcctgactctggggaccaaatacgttatcgccgataatccggcgtggtggcaggcgttcctcaaggagcacgtctctattctggcgatgaacgaagaggaggcggaagcgctgaccggactatccgatccgctgctggcttccgacaaggcgctggagtgggttgacctggtactgtgcaccgccgggcctgccgggctgtatatggccagttttaccgaggatgaggctaagcgcaaaacgcagcatccgctgctgccgggcgcgattgccgagtttaaccagtatgaattcagccgcgcgatgcgccatcaggattgcgaaaatccgctgcgtatttattcgcatatcgcaccctatatgggcgggccggagaagatcatgaataccaacggcgcgggcgacggcgcgctggcggcgctgctgcacgatatcaccgccaataactatcatcgcaacaacgtgccgaactccagcaagcacaagtgcaagtggctgacctattcctcgctggcgcaggtgtgtaaatacgctaaccgcgtgagctatcaggtgctgaaccagcactcgccgcgtctgacccgcggcctgccggagcgtgaagatagcctggaagaggcttactgggatcgctaagccggtaagtaaagccggccccgagaagtcggggccggaagcattaaccggtaataagctcgcctgctggcggcgtttcgagcagctgcagcatggcgcgggcgatttcccgctcgcccatcaccacctggttggcgccgcgttcaacgatatactccacttcatcgtcgtagtgggcgcgcgcgatgatctcgatattcgggcacttctcgcgcgcggaagccacgatttccccggcttcatagccgttagggatggtcagcagcagccagcgggcgcagtcaagatgcgccagattcataatctcttcattggcggcgttgcctaataccgcgcgaataccgcgtgcgcgcagttcgtcaacgcgggtacgcgaggtttcgataaccaccagcggcacgccctgcgccatcagtttttcaccgagcaggctcccgacgcgaccgaaaccgaccagcagcgcgtggttacagatatcgacggggatctgtttctcatcttcaagcacttcttccagcgtctgttcgtccagcgtctccgttttatcgagatatttttccagcagggtaaacaggaccgggttgagcatgatggagataatggcgccggcaagcaccaggttttgcccggcctgcggcagcagatccagcgccattcccagcccggcgagaataaaggcaaattcaccgatttgcgccaggctggcggcaatggtcagcgcggtgcgcggcgagtggccgaacattcgtaccaggaagaaagcggcggccgatttaccgaaaataatgatgaccagcgtcgccagcaccgccagcggctgatcgatcaggatcatcgggtcaaacagcattcccacggaaacaaagaacagtacggcgaaggcgtcgcgcagcggcagggtatcgtgggccgcgcgatggctgagctcggattcattgagcaccataccggcgaaaaaggcgccgagggcgaaggagacgtcaaacagctcaacggcgccgaaggcgatgccgagcgctaacgccagcaccgacagcgtaaacagctcgcgcgagccggttgccgcgctgcgtgacataatccacggcaccagtcggcggccgaccagcatcattatggcgataaaggcaacgactttaccgatggtaatgcccatatcgagggccagggtagccaggccaacgtcgcctttctcggtcatgccggcgaccgccggcagcagcaccagcgtcagcaccatcaccagatcttccacaatcagccagccgatggcgatttgcccccgctggctatcaataagctgtcgttcttccagcgcgcgcagcagcaccacggtactggcggtagaaagacacagaccaaaaacgatcccggtcattaacgaccagcccagcatggcagagagcgccatacccaacagcgtcgccacggcgatctgggcgattgcccccggaatagcgatagccttgaccgccatcaaatcttttaaggagaaatgcagacccacgccgaacatcagcaggatcacgccaagctcggccagctccggcgccagcttggtatcagcaacgaaacctggggtaaaaggtccggccagcacgcccgctaataaatatcccaccagaggagaaatacgtagcttattggcaatcatgccgagaataaaggcgagcacaaggccgccgacaatggtggtgattagcggtgttgcgtggtgcattccgtctccttgcagtggtgagctgatccattttcggcatatacccgtcatacttcaatttgcatgggcgttggctttcctcgctcaccccagtcacttacttcagtaagctccaggggattccctgcgtcgccgccttcctgcaacttgaattatttagggtataaaaccaaaaaccgaataatagtttatgacaatttcagcggttttgtttatgaataatcgttgaattttgcagaaaaatggaattggcatgcaaaaaagcacggaccgcaaaatggcagcagcttatgcggggtaatgctggtggagtaagggattgaggcagccaaagttacactttggctgccgaagaatcaggacttttggtggttgttaggcagaaatatcgtcaggatgccaatcagtggcaagaaagcgcagattttatagaccagctcgatactggtatggtcagctaacagccccagcaccgcggcgccaaggccacccatgccaaaagcgaatccgaagaacaaaccagaaaccataccgatccgccccggcaacagctcctgagcgtagaccagaatggcggaaaaagccgacgcgaggataaaaccaattatcaccgttaaaatgccggtccattccagcgatgcgtagggtaaaacaagagtaaacggcgctacgccaaggatagagccccaaataacatatttgcgcccaatcttatcgcctacaggcccgccaatcaccgttcccgccgcgacggcaaaaagaaaagcaaacagatgaaactgcgcgttttgcaccgataatccaaacttttgcatcagataaaaggtgtaatagctgctgatgctcgccatatagaagtattttgagaaaatcagcagcaaaagaatgctaaccgccagaatgactttgtttttcggcaatggattgacaatgaccgctttgggtttacctttgttcatacggtgctgagcggcataccagcggctgatctgcgccagcacgacgatcgccagcagcgccgccaggacaaaccagccaacgttacctttgccgtagggcgcgataatcagggccgcaagcagcgggcctaacgaactgccaaagttgccgccgacctggaatatcgactgcgccaggccatggcgaccgccggaggccattcgcgccacgcgtgaagactccgggtgaaagaccgaagagccggtaccgaccagcgcggcagccagcagaaccatcccgaagctcccggaaatcgccagcagtaccagaccgcttaaggtaaagcacatgcctatcggtagcgaccacggcatcgggtgtttgtcggtcagatagccgacgaccggctgcagcagcgatgaggccagctgaaaggtgagggtaatcatccctatctgcacaaaggtcagcgaaaactcggcctgcagcagcgggtagatagccagaataagcgattggatcatatcgtttagcaaatgtgagaggctgatagcgccgagaatgcgaaacgaggtgcgtgctttttgcggcgcagcagcagggccggataagggttgtgcggtctgattcattgccataggttcgcttaagtattttttatagaggatgcaggtggaattattatctgcctaacatacctgcccctaaggtttgaaggaagtcgcaattctgaaaacatatttgtctaatcggctaactcgctatactttcggcacttgtcatttcgtcagggagagaaatatgcactttatgaagcaaggcgttgcgctggcgctattcacggcgttatcgctggggagcctgtctgcgcaggcttatgagcaggataaaacctataaaattaccattctgcatactaacgatcatcatggccacttctggcgcagcgactatggcgaatacgggctgtcggcacaaaaaacgctggtggacggcattcgcaaagaggtggcggcagagggcggcagcgtgctgctgttatccggcggcgatatcaacaccggcgtgccggaatccgacttacaggacgcggaacccgattttcgcgggatgaacctgattggctatgatgcgatggcggtaggcaatcacgagtttgataatccccttagcgtactgcgtcagcaggaaaaatgggcgaagttcccgttcctctccgccaatatttaccagaaaagcaccggcgagcgtctgtttaagccgtgggcgctgttcaaacgcggcgggctgaatattgcggttatcggcctgacgaccgacgatacggccaaaattggtaaccctgagttctttacggatatcgagttccgcaaaccggcggaagaggccaaacttgttatccaggagctgcagcagaatgaaaaaccggacgtcattctggccaccacccacatgggccattatgacaacggcgcccacggctcgaatgcgccgggcgacgtcgagatggcgcgcagcctgccggcaggttcgctggcgatgatcgtcggcggccactcgcaggacccggtatgcatggcctctgagaataaaaaacaggtggattacgttccgggcagcccgtgcgcgccggataagcagaacggtatctggatcgtccaggcccatgagtggggcaaatatgtgggccgcgccgacttcgaattccgcaatggcgaaatgaagctggtgcactatcagctgatcccggtcaacctgaagaaaaaggtcacttacgacaacggcgagagcgagcgcgtgctctatacgccgcaaatcgccgaaaatccgcagatgctctccctgctgacgccgttccagaataagggcaaagcgcagctgcaggtcaaaatcggtagcgtaaacgcgcacctggagggcgatcgcagcaaagtgcgttttgtgcaaaccaatatgggacgtctgctgctggcggcgcaaatggcgcgcagcaatgccgatttcgcggtgatgagcggcggcggcgtgcgtgattcgattgaagcgggcgatatcacctataaagacgtgatgaaggtacagcctttcggcaacgtgctggtgtatgtcgatatgagcggtaaggaagtgacggagtatctgaccgccgtggcgcagatgaagcccgattctggcgcctatccgcagtttgccaacgtcggttttgtggccaaagacggtaagcttaataatttgaccatcaaaggcgaaccggtcgatccggcgaagacctaccgtatggcgaccctgagctttaacgccaccggcggcgacggctacccgcatattgataccaggcccggctatgtgaataccggctttatcgacgccgaggtgctgaaagagtatatccagaaaaactcaccgctggacgcggcagcttatgaaccgaaaggcgaggtaagctggcagtaacgtcagagcagcgccccggtggcgctgcgcttaccggggcgacaggtctgagcggttttggattttatagcccggacaaggcgcgtcagcgccgcctccgggagtgttccctgacgaaaaaccgtcaattaatcgcgacgcgcgatatcggcgaattttgcctcaaggatcttcgccagatcgctggccgccagctcaatatccagcccgcgtttgccgccggaaatatagatggtggcaaacgactgggccggcgcgtcaatcaccgtcggcaggcgttttttctgtccaagcgggctgatcccgcccaccagatagccggtgacccgctgcgcgaccatcgggtctgccatatcgactttcttagcgcctaaagccttcgccacctttttcaaatccagctgacccgctaccggcgtcaccgcgacggccagatgcttcatatcgccgttgacggcgaccagcagcgttttatagacctggtcggcgttgagccccagcttacgcaccacctcatcgccaaaattggtttcgttcggatcgtgatcgtagctgtgaatgtgaaaactaattttgtttttttcgagtaattttacggcgggagtcatcgttatccttcttaccaaccgatttaatgtgacataagcatacgcccgacggctgtctaaaaaatagtatcatcttgcgcaatagtattggcagtgatggtcactttgagcgacaatcagacgatccggggcgcgaaccccggaataataataatgatgaaattcctctttgacgggccaatagcaatattggccatttttttacgtcagcatgtccggcagattcccttccccgtacaaatgaagcgcccctacggcaaccacgtagcgccccggcggcagcgccagcagcgtttcgcgccaggcgagattgcgctgatgcatcagcacatcatatagcgactggctaaacgttgtcggcagcgaggttgcgcccgttgacggcggctgctccagccaccagccgatcatcacctgcagcagacgcgcattcgtgcgccagtgggtgagggtatcctccagcagcgccagaccgccgtcgggcagatcccgcagcagcgctatctggctatcggcgccctccagctccatcacgcggatattgctctcacgcgccgccatcagcagttgataatcaatgccgtaatccgcccttagccccagtttttgcgcctgagtcgcctgcaataccatcgccacctgccacagcggctggctgtcgaacagcgcgatggacagccccatttctcctgcccgctcttgcagttcagcaagcagggaggcgctcaggcgttccgccagcggcggacaggaggggaggttgctgaacggcgtttcgctgccgctaatatccgcttccacaatcagcgcatcggcctggcggatcttttttaataacctggcgggcggcggcgacatgtcgcgggtgcccatatgaatactgccgaccaggtgcagatagcgctcgccgggaagcgtgatatccagcgcgggccaggaataagacgagccgacggcggcttgccacagcatttttattcggtttaacaggcccatacgtgctccgtagtgtgaggaagccatgctagcgcgcggggggctggggcgcaaggggactcaacgtgcgcgacggaagaggcgttttgcaatgtcacgaaaataacaaaaaaatttgatgttctctttttcgtcatttctgtaatggcgttttgaaattaattatcacttaaaaaacaatggaatgactatttataacgtgaatgaccatggtgtttttttctcaaatattcctctgttgtgataataaaataaaaaatctgtaacaaaaaataaacaaagcgcttctatattggccccttcaatttttggggggagtgacatgcgtaactggagtgagcctaaaaagaataaagcccatatcgagctgatcccgatgatcgatgtgatgatgtttctactggttttctttgtcctgattagcctgaatgtgatcccggctctgggcttgaaaacgcagctgccgtcggccggcagcgcccaacagcttaaaccgcaaaaaaaagccattatcaccctcggcgccggcgaccagctgcagcttgatggccagccgctgcccctggatgcgctggtcaataccctgaagcaacagcagcaggaaaaccaaaccaccaccattatcgtgaacagcgataaagaggttgcggtggaacgcctgatcgccgtgatggataccctgcgtcagggtggtttcttctccatttccattgccacacggaagcagtgatatgtatctgctttatcgctcacgtcacgttgttagctggctacccgccattgtcgtcgcgggatgtttactgtttgtcagccagcaggcagtgctgcaggtcaaaccgcattatgacgatacggtcatggaactgtcgctggctgaacccgaaccgccgcagccggagcctgtcccggaaccgcagccggaaataccgccgcaaattcaacctgagccggaaccggaggcggtcgctgaacccgtcgttcctgcgccagaacccattatccaggccaaaccggttgttaaaccgaaagccaaacccagacccaaaccggttgtgaaggaaaaagcgtcgaaaccgcaggcgatcgcggctccgcagcccgccgccgttcgtagtccggtgagtaaaccagccgcgccgccttctcccccggcgccgaaggcgaacgcgcaggcggtggaaaacggctatctgcaggcgctgcgccgggagctggagcagcgcaagcgctatccgagcggccgtcaggcttcgctggagcgcccacagggcaacgtggaggtctggctggaggttgaccgcagcggcagagtgctggcttccggtattgccagcagggcgccgaacatgctgctcaatcgcgctgcgcttagttccctgcaaagcatcagccagctgaagccctttcctgaagaggcttttgccggacaaagcagcaaaaaatttaccgcgacgtttaattaccaggcgccataagcctaattaatcatttgtttttacaggaaaagaaatgaaaaactttaattattctgggattgcgttagccgtggtgtcggccctgttatcggggtcctcgctggcggcggaaagcagcgacgtgggggagattaacgttaaggggcaatcgctcggcggcggtctgatggtgcaggaagacagcggcaaagcgcgttccaccctgaccaaagaggcgatggaaaaagcccccggcgccagcaacgctatcgacatgctgaaatatacgccgggaatgaacgtcaacagcaatgacgccagcggcctgagcggtatcgactacaccatgcgcgggatgaactcggatcagatcggcctgtcgatggacggcatcccgattaacgactcgggcaactatgcggtctaccccaacctgctgggcgacgcggaaaaccttgagcagatctttgtcacccagggctcttccgaggctgacggcccgcatattggttccagcggcggtaatattggccttgtgacaaagcgtccctcaaaggagtttggcggcttcgtcaaacaaacgctcggcagccataacctcagcaaaactttcgctcgtctggagaccggggagtacaacggttttagcaactggctctcgtactcgcatactgaagccaaaaaatggcgcggggaggggcgtaattattccgataagttcgaaatgaactcgctgtacgaggatggcaacggcaacagcagcaacctgatcatgaagtataaccgtcaggataacagcaactataacaccctgagtaaagcgcagttcgaagaagacccgcgtcaggactactcgaccaccccggtctacaacagcaaaggtcagctgagcaaatattacaagctgaaccgtaatccgtttgaaaccttcaccctctcttttgcccagcgcttacagctgcgcgataacctcgcgttgaccgttcagccctattactactggggtaacggcggcagctttaccggacaaacggcctcggtgctgtccaatacgtctgataccgccggacagtacgatctcagcaacctgacttccaatacctactaccggccttcgtggacccagacctggcggccgggcgttaccacgaaattgaagtgggatattaacgacgaacacagcctggatattggctactggtacgagcgcgcgcgtcagtcgcagacccagccgtttattagcattcaggacgatggcaacccggcgaacgtttccggcaaaccgggcggttccgatcaggttaaagatgcgaacggcaatacggtacaggggcgtaaccagtacacggtgactcctgcgcacaaagtatggcttcaggacagctggttcgtgacgccggactggacgctggtgggcgggctggcttatcagtatgttgaacgtaaaggcgataataaaggcagcctgtatagcgctgcggaaaaacgccaggcgacctaccatgaattcctgccgaactttagcatcagctataagccggatagcgaaaatcagctgttctataacctgacgcgcaacatgcgtacgccacccaactacgtgctctacaacgtcggcgactcgatcagcaccaaacctgagctgagctggaaccacgagctgggctggcgttttcagcgcgaagatatgctgctgagcgcgacgctcttctatatgcgctataccgaccggcagatttcgaccaccaatgcggatggtgactacgaaatgatgaacatcggcagcgtggagagtaaaggtctggagctggagtggagcggtaagctgccgtacaacttcaactactacacctcttatacctacacccattccgaacaaaaagacgacattgtgagcaacggcggacatccgctgccaacggcgggcaaaacggtgccaaacgtaccgaaaaacatgcttaacgcgtcgctgggctatgacgatggtctctactacggcagcttcggcggcaaatacgtcagttcgttctacggtgatttgaccaacgacgaaaaaatcggcgggcgcacggtctttgatgtcgccgcgggcgtgcatctgccggtggataaaaagattgtcaaaagcgccaccctgcgctttggcatcgataacctgttcgataaacagtacctgacctccgtccgctcgacgacttttaacgcggcggcttacgacggcgtgaaggccagtaccccgtactacaacgttggcgaagagcgcacctttagcgtctcgctggaagccaccttttaattaaccggagggcactctgatggatgccaatctgattcacgatattattttctacgttatgtacgccgcgctggcgatcgccgtggtgatactggttgaacgcggcctctatttttcgtgggcccagcgtcaggctttgcgctttgaaaaggcgctgacgccggacgttcgccgcgcgtcggatctgccggaatcgctgaccggccgcagtagcctcccgctgaccctcattctgccggtgctggagaaaaagcagacggcggaagaccgtgaggcgatgagcgatctgatcgacgctcagtatctgctcagcaaaccgcagatgtcgcgtgggctgtggatgcttgaaaccgttgtcaccgccgcgccgctgctgggcctgctggggacgatcctcggtattatggatacctttaaggccctttccgcctccggcgtctccgatgccagcatggtttctgcgggtatggggaccgccctgtatgccaccggcctgggcattgctattgcgctgctgtgcctggtgggcaataactatttgcaaagccgcatggagcgaatcaacgaactgctgaaggtgctgctgatccgcgccggcagcccggtcagccgtccggagcagggcggcaaacgctgggaaggccacgaggcgcagcgctatgcctgaacatggtcaatgcgggtggccggcaggccgcctgatgagcgcgctggcggggagctggatgctgttaagccagccggtatgggcggcgttctctatacccggctacgagctggtgtataacgcgccgcaggaaaccaccttacaggataacgacttacgtcatgctgccgaggtctggcagcagatgttcgatgcggcgcgcagccatatcgatctggcgcagttttatgtggcgaatgaaaaaggctctctgctggatggggttctggcacgtctgcgggccgccggggagcgtggagtaaaaattcgttttctgatggaggagaagggcgtgggcctttcaacgccggaaacgctgacggcgctgaaagcgatcccgaacctggaattgcgggtgattccgttccatcggctgactggcggtattgttcacgccaagtatctgctggtggatggcaaagaggcttttgtcggtagccagaattttgactggcgcgcgctggaacagatccaggagaccggtctgcgcatcagcgatccgcaaacggtgcagcagattcaggctattttcgatcaggactggcaggcgcaagctctgctggcggagagtaagccggtaccgaagccggcgcggcaggcggtagcgtcggccccgcagggcaattatctggttgccagcccgcgcgattataacccgagcggggtgattgattcgcaggtggcgctgccgcggctgctggcgagcgccaaatcgcggatccgggtgcaggtgatggactatgcgccgctggcgtggggagaaaaggggagccggcccttttatgcgcccattgataacgctctgcgcagcgcggcggcccgcggcgtacaggtggagctgatggtggcgaactggaacctgaaaaagccggaggtattctggctgaagagtctctctctggtgccaaacgttcagctaaaagtggtgaccatacctcccgccagccgggggtttatcccctttgccagggtggtacacagtaagctgatgaccatcgacggtacgacggcgtgggtcggaaccagcaactggagcggaggctatttcgataactcacgcaaccttgagctggtgctgaataatgcgtcgatggccgcgcgcgtggacgcgctttacagccagctgtggaatagccgctatgcggcgccgatcaaggtcgattttgattatccggttccgcatcctggccgcgagttcgaatagataaatcggctgaggcttcccctctcccgaagggggagaggggaagcctgttttcgtcctcgccagaggctgccttatgctttgggcttatagcgcagcaggcggttggcgttgctcacgacggtaatcgaagagagcgccatggccgcgcccgccaccaccgggttgagcagcgttccggtcagcggccacaggatcccggcggcaatcggaatgcccagcgagttataaacaaatgcccccagcaggttctgcttcatattacgcagcgtggctttggcgatgtccagcgcatcggcaacgccgttcaggctatggcgcatcagggtaatcgccgccgtctcaatggcgacatcgctgccgccgcccatggcgatccccacatcggcctgcgccagcgcgggcgcatcgttgataccgtcgccgatcatcgccacctgatgcccttcgctttgcaggcgcttaatcgcatcggctttaccgtccggcagaaccccagcaatcacctcatcaatgcccgcctctttagcgatagcgttggcggtggtggggttatcgccggtcagcatgaccagacgatagccctggcggtgcagcctggctaatgccgccacgctatcttcgcgcagcggatcgcggatggcgaacagcgccgccgcctgaccatctaccgccagcagcaccggcgtggcaccctgtgacgcctgggcggtcatgtcgtcttctatttcagccgttgcaatcttgtgctcattaagcagcgcctggttgccgagcagcagacggcggccttcggcttcgccgctgacccccagcccgcgcagggtgcggaagttttctaccgcaggcaggcgttggtccgcggctttgtcgagaatggcgcgcgccagcgggtggctggaaccttgctccagagacgccgccagacgtagagcggtggactcatccatggcggtaaaggtttttatcgccaccacctgcggtttaccctcggtcagggtaccggttttatcaaagaccagcgtatcgagagtgctggcgcgctgcagcgcatcggcgtcgcgcaccagtacgccgtactccgccgcgcggcccacgccggagataatcgacatcggcgttgccagccccagggcgcacggacaggcgataatcagcaccgtggtggcgatcaccagggtatagacaatttgcggcgccgggccaaaaaagtaccagatcgcggcgctgaacagggctatcgccacaaccgccgggacgaacacggcggagattttgtccgccagctggccgatttcaggtttactgctctgcgcctggcgcaccatgcggataatgcgcgccagggtggtttgactgccgacggcgctggcggtaaacagtacgctgccgtcctgcactacggtcccggcatgaacggcgtcaccgtcgcctttttgctgcggcaccggctcgccggtgagcatcgcttcatcgaaccaggcttcgccctggctaatgacgccgtcgaccggtacgcgatcgccggtggtcagacgcaggatcattcccgcctgaacctcagccagcggcagatctttttcgccttcgtcggtgaccaccctcgctgacggcggggttaaatcgagcagtttttccagcgctttcgaagagcgctggcgcgcgcgggcttccagcatatggccgaggttaatcagaccgataatcatcgcgctggcttcataataaaggtggcgggcttccatcggaaaccactgcggccacaggttgacgctcattgaatagagccaggcgacgccggtacccagcgctaccagcgtatccatggtcgcggtgccgtttttcaggcttttccacgcgctgcggtagaaatggccgccggcaaagaccatcaccgccagggtgacaacaccgatagccagccacagggagcggttatcatcgctgaccatcatattgtcgccgatcattccccagcccatgaccgggataccgaccagcagggcgacgatagcctgccagcggaagcgcttcattgtggcgacggcggtttcctgctggcgctcgcggcgttcgaggtcgtcttcgatagcttccgcgccgtagcccgctttctctacggcctggactaattctgcggcggacgcgctgcccatcaccagcgcagtgcgttccgccaggttgacccgcgcctgcgagacgcccggcaccgcggcgagcgcgtgttgtacccgggatacgcagctggcgcagctcatgccgttgattaacagctgctggctgtcatcttcgtcacgggctgccggaagctcagaggtggccgctgtcagcgcttccggcgggattgatgattctgccagcggtttagcctttgggtggctgagctccgcgccgtatccggcctgtttaatggtctcaatcagcgcttccgcgctggcgctgcccgtgacgtgggcttcggtaacggtgacttccgcctgctcaacgtcgggacgctgctccagactctctttcacccgtttaacgcagtggccgcaggagaggccatcaagcgcgaggtcgatagtggtagacatacataactcctgaataaatttccggttaatgattgaccgaacacactctttcatcgagtattaacaaggttaaaccttccagcaaggggaaggtcaagggggaaagatgaatattagcgatgtggcgaaaaagaccggtttaaccagcaaagcgatccgtttttacgaggagaaggggctggtgacgccgccgctgcgtagcgaaaacggctaccgcagctacagccagcagcatctggatgaactgaccctgctgcgccaggcgcgccaggtggggtttaatctggaagagtgtcgcgagctgatattcctgttcaacgatccctcgcggcacagcgccgacgtgaaacgccggacgctggagaaagtcgcggaaattgagcggcatatcagcgagctgcagggcatgcgtacgcagctgctggcgctggcggactcctgcccaggcgatgacagcgcggattgcccgatcatcgataatctctcaggctgctgtcaccgcaaggcgcaggcttaacgccgcgccgggttgagcataaagaccaccgtgccgcggtagtagggggagtcattcagctgcatttccgcctgccgatcgcgtttgccgttttgcaccagcccgagtttgaacgggatacgcagccggctgagcgcggggagatagtcctgataattcgccaccgtgcggcgtccttgatagctttgtaccaccagttcatcaaccgcaagcgcgttcagtgtggcaatatcgccggttttagcccagtccagcaggcccgttacccccagcgcgaactctggcggcagctgctggcgtagctgttgcaaaaactgggcgtagtcggcgagctgatatgtggctgcgtcaaaatcaacctgcagaccaaccacctgattgccagccgcccgccagcgctgcatcaggcgtacgatccgcggcacaatcgtctgtggtacatcaagtgtggtaaaccggacggtaagccagattgcgggaaacgtcaggcggctgaccggcaggccgaggcgctggaatatgacctcgcccgcgcgcgtcagcacctcgccctgatgcagatataccgtctgcgcgttctgcagatcgttgctggctttcaccccggaccacagccagaaggcggaatgctggcgcgcatccacgcgctccgccgcctgcgctgacccggacagcagcgcgattaccagtaatatttgagtttttgcgcccacgggcttcccggatactgcgttttcaactgcgtgaaccagcccttacgctgcagtttttcgacatcttcgccgccgcattcgttgctaccggagggggcgtaacagagaatcgcccgatagagcgcatagcttttatcttccggctccgctttcggcgaggtgataatctgctggtaatagcgttggcgatcgtactgtcccagaggctgctggcggttgatggcgggctcgagcatatcgttgccggcgtggtctttccacagatcaacatgcgtctgcgtggtgcggaagaactcgcccaggcagttaagcccatgggcatcgtcggcgtttttactgagcacggtgacggtgtcatccaggctgcggcaggcataaccggcttcggtcgcctcgccatcccagtcgaagctgctaaggttgacgtcgttaaaggcctcgctgattaccggctgggtaatagcggtggcgagctttttgtcgttcagccagtcgctgaagcgactttccgtgagatcccgcaccagcagcgtatgcagagcgatagtacgttcttcattattgggaccgttggccgcctgttggcgtagcagttcaggcgaggcctgggttttcagcacttgggagcgaaagcgtagattggtcactgggctatcggcggcaaagatagccgccgcgttaccgctgtagaccagcgttgccgccagttttgcctggatatactgctgttgctcgggattttggctaagttgtagcagctgctgccaaaaagagcgcgccgcgggccactgtgtttgtcccattagcgcttcgccgtagaggacctgttcgctgaaggcgagaatatcattcgccggcagcgttttcgccggcgtgacagcctgcaggatggcggcatcgttgcccgtcgcgctccacagctgcagctgcaggtcgcgccacagcggcagatttccgctcttctcaaacgccgctttgctggcgtcaagctgtgcctgggttaaggttggcttattgtcagcattcaggcgcagggcgcggagaagttcgacatagctgacctgcggcgcgtccgggaatgctgccagaacgggctgcgcgtagaacggcatgccgaagacattatcatattcactcaccagtctacgcagttccccggcgtcggcagcctgccggaaggcctgctcatagagtccggccagctgcggccacgcctgcagataccagttaatgcggcgcagcatattgcgcgcggagtcggcataaagccctgcgggccagcgttgcaaataggcttgagcttctttttgcgcctgtgcggcatcatcacgattgatccgcgcaatatcaaaatcaccgtactgcccgacgctgttctggctacttttgttgagcgccgtgcgcatcagcatatattgcgcggtctcggtcagccagggctgctgactctcccgcaacagagtgaaatcgtgggtcgcggcggtgtaattgccgccatagaagtgggcgatgccggaaaggtaataagcgaataagtcggcgtccgcatctgccgggaagctattgaggatatcagcgactgcggtgatattggcgccataaaacagtttcagccgcgccagcgccaggtcatgacgctgctgcggggtcacagagggcgcggcgagcagggcggcgttgaactggctgacggcggcaagggtgttgctgacaaagcggttttccagttcatagtcggatgttcccagccgttcagccgaatcggccggcatgatctgcgccggatcgatattcagcgccgccatttgttggatgaaggtttcatcttcgcgttgcgccggcggcgcgggaggcggcgcgctatcccactcaggatgccaggcgaagtaaacatcgcgggtacggctgacatcagcgggaatggcctgaacgggcagggcgaaagatttcgcttcgctcagcaggcgcagcaagttgtcccgcgagtcatttcccggtgtcagtacaggttcgccttttagcaggcatagcgggtcgctccacgagcaatcttcgatatcagcagaagcatatgcctgagcggctgccgcgagcagggcgcagagcgaaagggtaaacgttgtcttcctgaccatgacggatgtcctgtggggtgattattgtgatacgactcttatatgtagggttatgccttcgatggcgaccacttcaaccttgctgcccgccgcgaggtcgtcatcggcaataaccggccatgaactgtcgcccacgcggacgtgtccgcggccgttaaccagcgccgtttccagcgtaaagcggcggccaagcagctgctgcccgcgctgattaagctgagcgtccgccggcttctggcgcttaacgcggttacgcagccagcgcgaccacagccaggccgccagcagggtcagcacggcgaacagcgtaccctgccactcccagctcaacggcagcatccagaccagcagcccggttacgacgccggcaatgccgctccacagcagataaccgttgccgccgagcatttccgccgccagcagcagcccgccgaggctgagccagaaaatatgcgggtgggcgagaatcagcgcgatcatgattttttctgcgcgccagcgccttctttaagcagctcgccgatcccggcgatagagcccatcagactgctggcatcgagcggcatcagcaccactttgctgttattggccgcgccaatttgctgcagcgcatcggtatatttctgcgcgacaaagtagttgatggcctgaatgtcgccggaagcgatagcggatgagaccatctgcgtagcgcgcgcttcggcttccgcggaacgttcgcgcgcctctgcctgtaaaaacgccgactgacgctcgccttcggctttgaggatctgcgactgcttctcgccctcggcttttaaaatttccgcctgacgtatcccttcggcctcaagaatataggcgcgcttggtgcgctcggctttcatctgggcgttcattgaggcgataagctccgccggcgggcgtacgtcgcggatctcaacgcgggtgattttgatgccccacgggttggtcgcttcatcgacaatatgcagcaggcgggtgttgatgctgtcgcgctgggagagcatttcgtccagctccatggagcccagcacggtacgaatgttggtcatggtcaggttgataatcgccagctcgaggttgctgacttcataggcggctttcggcgcgtcgatgacctgaataaagcacaccgcatcaatggtgacgttggcgttatcgcgcgaaatcacctcctgcgaagggatatcgagcacctgctccatcatattaattttgcgcccgatacgatccataaagggcaccaccaggctcatccccggctgcagcgtttgcgtatagcggccaaagcgctctaccgtccactggtagccctgaggaacgatttttaccgccgctccgacgataaccagcgcgacgaaaataagaatggggataaaaatcagcatcaaaaacctcctgtcttgttgcctgttgatgcgccgggagagtggcgcgcgtttaaccagagtatatctttccgcgcatccgggtgaaagaaaagtggagtaaactagaggcgttgtcgaaaaactgggaataataatgaccgaaagtaacgctattttgcgcctggacaatgtgggttttcaggccgatggagtgaccatccttaatgagatgagttttcagctcagggcaggggaatttaagctgattaccggcccttctggctgcggaaaaagcacgttattaaaaataatcgcttcgctgctgagccccaccgcgggaagcattttcttcgccggtaaaaacattaatgacttaacgccggaaacctatcgtcagcaggtttcctactgcgcgcaaaccccggcgctgttcggcgattcagtgtatgacaacctggtcttcccgtggcagatccgtcatcaacagccggatcccaacgcgctggtcgccgatctgctgcgcttcgggctggcggagaatacgctggaaaagtcaatcaatgaactttcgggcggggaaaagcagcgcgtttcgttgattcgcaatctgcagtttttaccgcaggtgctgctgctcgatgaaattaccagcgcgctggacgagagcaataaaaaaaacgtgaatgagattatccatcgctacacgaccgaaaaaaatattgccgttctgtgggtcactcacgatagcaatgaaattgcccatgcggatgaagtgattaccctaaagcctgccggcggaaaagcgcaggaggagaaaaaaaatgaacgggcataatattactaacgaatcgctggcgctctccatggttctggtgctggtagcgatcgtggtcagctaccgggaaaagctggcgctggaaaaagatattatctggagtatctgccgggcgattgtgcaactgattatcgtcggctacgtgctgaaatatatctttaacgttaatcacgccgtgctgacgctgctgatggtgctgtttatctgctttaacgcggcgtggaatgcgaaaaagcgcagcaaatatatcgataaagcctttctttcttcgtttatcgcgataaccaccggcgccggattaaccctggcggtgctggttttttccggatcgattgcgtttgtgccgatgcaggtgattccgattgccgggatggtggccggtaacgcgatggtggcggtcgggctgtgctacaacaacatggggcagcgtttcagcagcgagcagcagcagatccaggagaagctgagcctgggcgcgacgccgaagatggcttccgcaaggcttatccgcgatagcattcgcgccgcgctgatcccgacggtagattcggcgaaaacggtggggctggtgagcctgccggggatgatgtcggggctgattttcgccgggattgatccggtaaaagcgattaagtaccagattatggtgacgtttatgctgctgtcgaccgccagcctgtcaacgattatcgccgggtatctgacctacctgaagttctttaatgctcgccatcagctggtggtgacgcagctgaaaaaacgcgcgtaagttttttccccggaggcggcgctgaacgcgcctgtccgggctaccgtcccgcagacggcggggaacctgtagcccggctaagcgcagcgcgagccgggttttttacgattaataaagcagagagtagagctggcggcggtacttcgcggccagcgcgtcgccggtgccgagggcggagaggatctcctgcagcagcttgcgaacctcgccgtttccggcgcctaaatctttttgcagatggctgaacagcagcgccagcgcctcttcgttacgcccaacctgatgcagctgtaatgccagctgggaggccagcgccgcgtcttccgggttctgctctacctgctgctgcagttgctgaatttccggcgtgtcggcggcttttttcagcagctcgatctgcgctaccagtccctgatagcgggtatcctgatcctgcagcggcacggttttcagcaccgtttccgcttcatcggaacggtgcagggcaatcagcgtttccgccagcagcaggccaatctggctctcctggttcgacagctgccaggcgtctttcagcagcggcagcgcttcggcgtagttctcttcctccatcagcgccagcgcctgctgcgctttgagctcctcttcgcgcggcaggaacttatccagcagcgcgcgcaccgcttcttccggctgcgggccttcgaagccgtcgaccggctgaccgttctggaacaggtaaaccgtagggattgcgcgcaggccaaactgcgaagccagcatttgttcggcatcgcagtcaactttagcgagggtaaacaggccgttgtactgggcggcgaggctctccagtaccggcgtcaactgctcgcaatgttggctgcgcgcggaccagaaatagaacagcaccggcgttgtcgcggactgctgtagcgtctggtgtaggttagcttcggtaatattgacaatattctgtgcggacatgagcaagtctctttgatcgatatttgtatagatatatgggggcgacggcaggcgcttcaacttagccctggataattttgtccatcgcgcgggtcggcagcaggcgtttcagcagggcgaccgcatgcgccaccagagtgaccgggtagcgcagcttcggtttatcgctgacaaaagcatggcgcactttttccaccaccgcttccggcccgagagtaaagcgggcggcgatgccggggttttccaccggcttatcgacctgggtctggttgacgttgttggtgaagcgggtgtggatcgggcccggctcaatcaggatgaccttaactccgctgtggcgcagctccatgcgcagcgcatcggaccaggcttccagcgcgaatttgctggcggcataggcgccgcggccggggctggagataattcccatcaccgatgaggtcatcacaatacgcccttcgccgtgcggctccattgccggaagcagcagcatcgttagctgatggacgccgaaaaagttggcggaaaactgctgctccatctgccggcggctgatggtcggcagcgggccgtagacgccgtagcccgcgttgttaaacaggccgtacaggcggttgtcggtcagggcaatcacctcggcggcggcgcgttcaacgctctgcggatcgtcaagatccagcaacacaccggtcagccccagctcctgcatccgtgcgacatcttccgctttgcggcaggcggccagcacgttaaagccctggcgctttaaatcaagggcgctttcaagaccaattccgctggaacatcctgtaactaaaaccgatttttgcataactttacctgcaaatgactcgctgttatcaggagtcatgattaactaagggagccaaacgcgtcgccatccagtcggcgataaacggctgggcgtcgcgattagggtgaattccatcgtcctgcatccactgcggtttcagataaacctcttccataaaaaagggcagcagaggaatatcaaactctttggccagtgccggataaattgcgctaaaggcttcattataacggcggccatagttggcgggcaggcgaatttgcatcagcagcggctgggcgttcgccgctttgatatgctcaataatggtacgcagcgtctgctccgtctgctgcggcgggaaaccgcgcagcccgtcgttaccgcccagctctaccagcacccagcgcggctgatgctgcttaagcagagccggcagccttgccagcccctgctgcgaggtatcgccgctgatgctggcgttaaccaccggcgttttggtctgccacttatcgttaagcagcgcaggccaggcggtattgcccgccatgcgataaccggcgctcagactgtcgccgagaaccaacagcgtgtcggccgccatcgcgcggcaggtaaacaggaccagaaacaggaaaggcaaatgccagcggaaaacatacttgaagttcatcgtcttaagaaatccgtcggtcagggtgagcatcagctttccatccttaccggagttgagctggttgtcaaacaggggcagaccatcgccctgattggcgagtcggggtccggtaaatcgacgctgctggcgatcctcgccgggctggacgacggcagcagcggggaggtttcgctgctcggacagccgctgcaccagatggacgaagaggcgcgggcgaagctgcgcgctaagcacgtcggctttgtgtttcaatcttttatgctgatacccaccctcaatgcgctggaaaacgttgagcttccggcgctgctgcgcggcgaaagcgatagccagagccgcggcagcgcccgggcgctgctggagcagctggggctgggcaaacgcctgcatcacctgccggtacagctctccggcggcgagcagcagcgggtcgcgctggcgcgcgcgtttaacggccgcccggagctgctgttcgccgatgaacccaccggcaacctcgaccgtcacaccggggataaaatcgccgacctgctgttctcgctgaaccgcgagcacggcaccacgctgatcctcgtcacccacgacccgctgctggcggcgcgctgcgaccgacggctgaggctggtggatggccagctgcgggaggaagcatgatcgcccgctggttctggcgcgaatggcgctcgccgtcgctgctgatcgtctggctggcgctgagcctggcggtggcctgcgtgctggcgctgggctcgataagcgaccgcatggagaaaggactcagccagcagagccgggaatttatggccggcgaccgcacgctgcgcagctcgcgcgaagtcccgggcgcatggattgacgaagcgcgtcgccttggtttaaccgtcggcgaacagctgagcttcgccactatgacgttttccggcgatacgccgcagctggcggacgtcaaagcggttgacgacacctatccgctatatggtcagctgcagacccagccgccggggctgaagccgcacgccggcaccgtgctgctggcgccgcgattaatggcgctgctgaatctgaaaaccggcgacaccatcgacgtgggcgacgccacgctgcgcattgccggcgaggtgatacaggagccggatgccggatttaaccccttccagatggcgccgcggctgatgatgaataccgcagacgtggcgaaaaccggcgcggtgcagcccgggagccgcgtctcctggcgctataagtatgccggaaccccgcagcagctggcggactacgaaaagtggctgctgccgaagctggggcctgaacatcgctggatcggcctggagcaggatgacagcgcgctgggtaaatcgctggagcgctcgcagcagtttttgctgctgtcggcgctgttaacgctgctgctggcggtcgccgcggtggcggtggcgatgagtcattactgccgcagtcgttacgatctggtggcgatccttaaaaccctcggcgccgggcgggcgcagctgcgcaagctgattgtcggccagtggctgatgctgctggcgctggcggtggttgccggcggggcgatgggcgtcgggctggagcatattctgctgctgatgcttaagccggtgctcccggcggcgctgccggcggcgagcggctggccgtggctgtgggcgatcggcgcgatggtggtgatttccctgctggtcgggctgcgtccttatagactgctgctggcgacgctgccgctgcgggtgctgcgccaggatgtcgtcgccaacgtctggccgctgacgatctatattccagtagtgtgcgcggtggtggtagccctgctggcgctgctgatgggcggcagccccctgctatgggcggtgctggcgggggccgtggtgctggcgctgctgtgcggcctggcgggatggggcgttctgtggctactgaagcgtttgacgttaaaagcgctgccgctgcgcctggcggtgaaccgtctgctgcgccagccgtggtcgaccctgagccagctggcggccttttcgctgtcgtttatgctgctggcgctgctgctggtgctgcgcggcgatctgcttgaccgctggcagcagcagctgccgccggaaagtcctaactatttcctgattaacattgcgccggagcaggtggtaccggtgaaaaccttcctcgtcgaacatcagacccgcgccaccgagttctaccccatcgtgcgcgcccgcctgacgcaaattaacggtcaggtgacggagggcaataaagatgaagccctgaaccgggagcttaacctcacctggagccgcgagcgtccggatcataatccgctggttgccggtagctggccgccgaaggcgggcgaggtgtcgattgaagaggggctggcgcagcgtctgggcgtcaagctcggcgatagcgtgacctttaccggggatactcaggactttagcgcgaaggtgtccagcgtgcgtaaagtcgactgggagagcctgcggccgaacttcttctttatcttcccgcagggggcgctcgacggccagccgcaaagctggctgaccagcttccgctgggataacggcaacgggatgctcacgcagctcaaccgcgaattccccaccgtcagcctgctggatatcggcgcgattttgcagcagattggccaggtgctgacccaggtaagccgcgcgcttgaggtgatggtgattctggtgaccgcctgcggcgttttgctgctgctggcgcaggtacaggtcgggatgcgtcagcgttatcaggagctggtggtctggcgcacgctgggggccgggaagtctctgctgcgcaccacgctgtgggcggagttcgcgctgctgggcgtggtgtccggcgtcgtggcggcgattggcgctgaggtggcgctggcgctgctgcaaagcaaaatttttgacttcccgtggtctccggactggcggctgtgggtgatgctgccgctgtgcggggcgatactgctgtcgctgtgcggcggctggctggggctgcgtctgctgaaaggtaaggcgctgttccgccagtttagtcagggatagggttagctatgtagcccgggtaaggcgttatccgccacccggggggtcactgtatgcgggaaagtagcccgggtaaggcgtcagccgcaacccggggggttacccggtacggatgcgcgttgctattgcagatgaccgtggttcagcgcggtgagcggctcattaacatcgaaaattttgcagataacctcgtttacgccgagagatttcagacgcgcggtgtgcttgttgagataagcgagcgcggtttcttcattcgcaaaaagatagatcccgcccgcctcctgatttttttcgctttccgtccagaccttccagataaaacccggctcctgattgatggactcggccagctccacgagctgacgggacatctcgctgccgaagggaccgttaaaggcaaagtgcagctgcagtagttttttcgacatacttcctccatggatgatgtttgcgcggtaatagaccattttaatgacatggcgatgaaaagataaccacagtttttttaacggcacaaaatggtaagtcactgatttttaaccgcacgaaacattaaaaactcaacaacacgccatactcgaacgcagttaatattcaactggcaaatataaggttgcttattaatcaaggaaaaagtatggcacataaaataaaagcgctggcgataacgatcggcgcagccctggcgttaacctcttttgcatcccaggcggaaattacgcttttaaaacaagatccacaggcgggcgatccgttaagccggcttaatttcaccgtcggcggcagcatccgtccccagttcaacatgatgtccggcgacggagacaaaggctcttataaacgtaacggcttcgatggcggtacccgtttccgcttcgccgccgactactatctgttcgatgatattagctggatcagctactacgagctgggcgtcaatattccggcgcttttcgactgggataaccactacgccgaaggcgcgaataacaccagccgccgtatgctctataccggcctgaaaagcgatacctgggggacgttaacctacggtcagcagaacagcgtttattacgacgtggtcggggtaaaaaccgatatctgggattacgacatgataggccaggcgccgggtaacggcatcaacggcgactacgatggctcctatcgctcacgcaatatgctgaaatataagaaaaccgttggcgatgtcgatctttacgcctcttatctgtttgaggacagcgaatatctgccgggcaacggcctgcgctacaaacgtaaaggcggtggttccatcggcgccgattaccacatcatgaaggatttgacctggggcgcagcgtggaactatacccgcgccgatatgcgtaacccctccagttcagacagcaaatcatacgaccagaatatcgtcggtaccgcgctaagctggacgccggataactggaccttctccttcggcggcggctggtatcagaacttcctgaccaccaaaaaaaccgatgttcataactacttcgcgggcgatgcctggggtattgagtactttgccggttataaattcccgattggtcagtatgcggtgaaatctattcagccgtactttatgggcgaccgcctgcagtacgtgaacggccgcaactatcagcggattgataacggcgtcggcgtgagcttccagctggattatggtttccgcgttgactatgaacacgtcttcacgtcgagcaccgacaacctgggcgatatgaacctggtgcgtctgcgctacgacttctaagcgctgacacttccccggtgacgctgcgcttaccggggctacaggttcatcgccgtctgcggacccgtagcccggctaaggcgtttacgccgcaagccgggacaggagagaatgtgattactccgccagccaggcggcgacgtcctgccagctgccgcgaaaaataatcttctccgcttttttgccgagctggtagcggtacatcggatcgtaatactcgttcagcaggggaaccagccagctgaagtgggcttcggtgctggcggttcgctgctgctcaagcagggcttcatcaagccgggcggtgagctgggcaaaacgctgtaacccaaggcggcggcggatcgcgaacagaccatgatgcagatattcgctatacgcctgccagccttgctcttcgccgtaggccgccaggaaatcatgatgcatgcgcgcaaaatactcttcccgcagccgttcaagacggacagcgaacggatcttccaccaccgccagcggcgactgcgccatgcgaaggcgcatgcactccggcaggtgattggcgccaatcatatgcccctcatcctccagcacccagcgcgtctgctgccctgactttttgagcattgccacggccaggtgattttcaaaggttgcctgctgatgctgctcctgcagggttcggccaaatgaagagccgcggtgatgggcgagcccttcgagatcgataccgtccggttgagcgccgaccagctgggttttaccgttaccggtacagccgccgatcagtacgatagggcgctgcaccagctcttcggtaagctgtatcgccgcctggcgcagcgctttgtagccgccgacgatcagcgggtaatccacgcccgcttccttcagccactgctggacgatatgcgaacgctggccgccgcgagcgcagcacaggtagccctcgggatagcgcgcgcaggcctctttccagacggcgaggcggcgggcgcgaatctcgccgttgaccagctgatggcccagcgcgagggcggcgtccggcccctgacgcttatagcaggtgccgacggcggcgcgctcgtcatcgttcatcagcggcaggttgatcgccgcgggcatggcgctttgcctgaattcaaccggggcgcgtacgtcaatcagcggcgtatcgctggcgagaatctgccgaatattctgtggtactaattccatcatttaaaccgttatgtcattcagacgcgtcgctcgacgcgataattcttctattgtacgcggtgagcgccctgctgaattgatttttcacggtgtatcgctgaatagcgtcaggaatggctggatttaagcatccgtggggctggcaagttgggtagcccggctaaggcgcagcgcgccgcaagccgggataaaggagagaggattacgccagctgcgcctgcgcccagaagataccgctggcatattccggcggcagcagcggcttcagcgcttccagcgtcgcgctcaggcggtcggtatcgctgtcggtcaggttcaggtggccgactttacgacccggacgtacctctttgtcgtaccagtgcagatgcaccagcggcagcttcagccagtcatagttcagatcggtaccgatcaggttgatcatcaccgacgggctgtttaccaccggcggcggcagcggcagatcggtaatcgcccgcagatgcagctcgaactggctaatggaggcgccgttttgcgtccagtggccgctgttgtgcacgcgcggcgccagttcgttaatcagcaggccatcagcggtgacgaaacactccatcgccatcacgccaacgtagcccagctcatgcatgatcgccgacagcatctgctccgcctgcgcctgctggcgggcattggcctgcggaaaagcgacgctggcgcgtaaaataccgtcctgatgcaggttgcgggtcagaggatagaagaccgtgctgccgtcccgggcgcgagcgccgaccagcgacacctcgccggagaagttaatgccctgctcaacgatacactcgccgtagttatcctccggcagctgcgcggtttcattttcccgcaaacgccactggccgcggccatcgtagccgccgacgcggcgcttaacgatagccagctccccgaggcgggcgaataccgcaggccattcgcttttatccgccagaagctgccacggcgcggtggcgagcgccagcttatcgaacaactgcttttgtgtcaggcggtcggcgattatcgggaaaacgtcgcggttaacgaaggcggaatgacgcgccagctcgcgggtcagcgccgtttccggccagcgttcaatctctgcggtaatcacgctttgctgtaccggcaccgcttccgggtcggcttccagaccgaccggccagaccgcgatacccagcggctcgccggcctggcgcagcatccggccgagctggccgttgccgagaacgcaaacctgcttcatgccgcaccccgcggatccgggttatccagcacgtcatcggtttgcgcctgacgccaggcgctgaggcgctggtgcagttccgcatcgtgctgggcgaggatctgcgccgccagcagggcggcgttggcggccccggctttgccgatggccagcgtacccaccgggatgccgcgcggcatctggacgatggagtagaggctgtctacgccgctcagcgccgcgctctgaaccggcacgcctaacaccggcaccagcgttttcgccgcaatcatgcccggcaggtgcgccgcgccgccggcaccggcaataatcacctgaaaaccgttttcttccgcgccttcggcgaagctgaacagtttatcgggcgtgcggtgggcggagaccacttcgacatggtacggaacgttcagggcatcaaggatttctgcggtaaactgcatggtagcccagtcgcttttggaccccatcacgatggcgatacgcgccgaattattgcgggaagacatgcgtcttaaaactcctgtgggtgtgtttcacactgctttagaggccacagagaatagcatgaactcccggcaaggaaaacggttgcgtgcgcatggccagccgcctttgtgttgtcggtattcgatgaaacgcgccggttatgagcgggcaaaaagtaaaaccagcccccgtccccgggtcagcataagaatgcccatcaccagcaggtagatttgcacaacgcgctcatcgtgcggcccggataaatcgcggaaaataaagaatcagcccttgccgggggctagaaaggaaaatgaatcagctcaacgtcttctggcgtcactttgaccatagagccctggctatgccaggcgccgagcaccacgcgatacgcggattgaccgttggcttctagcggatggacggcaggacggtgcgtatgcccgtgaatcagccattgaacgtgatgtttttccataacgtcaacgaccgcctggggattcacatccataatttccatcgacttgctgctgttggccgctttgctgtcggcgcgcattctggtggcgatacggcggcggataaacagcggcagggccagaaacaggcgctggatccagggattgtgcactttcgcgcgaaacgccagatagcctgcatcgtcggtgcagagggtgtcgccgtgcataatcagcaccttgcgcccgtagaggtcgagaagcttctcttccggcagcagggtcatcgcgctttcgcgggcaaagcgcttgccgacgagaaagtcgcggttgccgtgaaggaagtagcatgggacgccggaatcggccagcgctttgagcgctgcggcgatttgccgatgcagcgggttaggatcgtcatcgccgatccaggcttcaaagagatcgccgaggatatacagggcgtccgccctgcgggcttccccctgtaaaaagcgcagaaaaccggcggtaatcgccggttcttccgtttgcagatgcaaatccgcaataaaaagtgtcgccacgaattattcgctaacggtgacgcttttgatcacaacatcttctttcggcacatcctggtgcatgccgctgcggccggtggcgaccgctttgattttgtcgaccacgtccatcccttcaacgacttctgcgaatacgcagtagccccaaccctgcaggctttcgccggagaagttcaggaagtcgttatcggcgacgttgatgaagaactgcgcggtggcggagtggggcgcctgagtacgggccatcgccagcgtaccgcgggtgtttttcagaccgttgttcgcttcgttctgaataggagatttggtggttttctgattcatgcccggctcaaaaccgccgccctgaatcataaagccgttgattacacggtggaaaatagtgttgtcgtagaaaccttcacgacagtagtccaggaagtttttaactgtttccggcgctttgtcgtcaaacgtcttgattacgatatcgccatgattggtgtggaaagtaaccatttttgcatcctgttccgatgattgtggtgcctgcacccggagtcgggtgagatatagggggctgttatagcataaccgcggggttggatcaccttgcaatgtgtgctgcttcggggttgaattaaggttagaatacgcgacttatatccacacacgtctacacggaatcttcgatgttaaaaatttttaatacactgacgcgccaaaaagaagaatttaaacctatccatgccggggaagttggcatgtacgtgtgtggtattaccgtttatgacctctgtcacatcggccatggccgtaccttcgtctcattcgatgtggtcgcgcgctacctgcgtttcctgggctacaagctaaagtacgtgcgcaatatcaccgatatcgacgacaaaatcattaagcgtgctaatgaaaacggcgaaagctttgttgcgctggtggatcgcatgattgccgagatgcacaaagacttcgacgcgctgaatatcctgcgcccggatatggagccgcgggccacccaccatatcgcggaaatcattgagattaccgagcagctgatcgccaaaggccacgcgtatgtcgccgacaacggcgacgtcatgttcgatgtgccgaccgacccgaactacggtcagctgtcgcgtcaggatctcgatcagctgcaggccggcgcgcgggttgatgtcgttgacgtcaagcataacccgatggactttgtgctgtggaagatgtcgaaagagggcgagccaagctggccgtcgccgtggggcgcgggccgtccaggctggcacattgagtgttcagcgatgaactgcaaacagctgggcaaccattttgatattcacggcggcggttcggatctgatgttcccgcaccatgaaaacgaaatcgcccagtccacctgcgcccacgacggcgagtacgtcaattactggatgcactccgggatggtgatggttgaccgcgagaagatgtcaaaatcgctgggcaacttctttaccgtgcgcgacgtgctgaagttctacgacgcggaaactattcgctacttcctgatgtccggccactatcgcagccagctgaactacagcgaagagaacttaaagcaggcgcgttccgcgctggagcgtctgtataccgcgctgcgcggaaccgacaaaaccgcagagccggccggcggcgaggcgtttgaggcgcgctttatcgaagcgatggatgacgattttaatactccggaagcctattccgtgctgttcgatatggcgcgtgaggttaaccgcctgaaaaccgaagatgccgccgcggccaacgcgatggccgcgcatatgcgcaagctctcttcggtactggggctgctggaacaggagccggatgccttcctgcagagcggcgcgcaggcggacgacggggaagtggcggcaattgagtcgttgatccagcagcgtctggacgcccgtaaagcgaaagactgggcggcggcggatgccgcgcgtgaccgtctcaacgagatgggcatcgtgctggaagatggcccgcagggcaccacctggcgccgtaagtagtctcattctctctttttagccggggccatccccggcatttttttgccctgactcaggctaagaaacgaagcgcggtcctgatttcgcctgcgttcgttcccggccagcggctgcagcgttcgtcggggagaagaggtatcaggcggaagtgcaggttgccggaggcagccaggggagcggctgtgctacacaggacgtgatatcggaagatggcggcgctgactgaagtgcagaaaaacgagagatcatctgtcggggtggggggacaggcgccggctgcggcgcctgaacgtgttactcggtaacggtaacgctctgaccttcaaagctgaccgtctgaccggcgacgattttacagcgtttacgggtttccaccgcaccgtcgactttgaccagaccgtcggcgatagcgattttagcctgcgcgccgctttcgctccagccttccagcttcagcagatcgcacagttcaacgtgcgggtgtttgcctaaagaaaaattcgccatctcaggcctcctgaatatcgtgatactcttcacacgcctgcagcgtgttctgaatgagggtggctacggtcatcgggccgacgccgccgggaactggcgtaatgtacgatgcgcgcgcggcggcatcttcatagaccacatcgccgaccactttgccgctttccaggcggttaatgccgacatcgatcacgatcgcgccttctttaatccattcgcccggaataaagcccggtttaccgacagccacgatcagcaggtcggcattttcgacgtgatgacgcaggtttttggtaaaacggtgggtgacggtggtggtgcagcctgccagcagcagctccatgctcatcgggcgtccgacaatattggaggcgccaatgaccaccgcgttcaggccgtaggtatcaatgttgtaacgctcaagcagcgtgacgatcccacgcggcgtgcacggacgcagacgcggcgcgcgctggcacagacggcccacgttatacgggtggaaaccgtcaacgtctttgtccggcgaaatgcgctccagcactttgacattatcaatgccggcgggcagcggcagctggaccagaatgccgtcgatggcgctatccgcattcagggtgtcgataagttccagcagctccgcttcgctggtggtttccgggagatcgtacgagcgggagacgaagcctacctcttcacacgctttgcgcttgctgccgacataaatctgcgatgccgggttgctgccgaccagcacgacggctaaccctggagcacgaaatccggccgcaacgcgcgccttcactttttccgcaacctcagagcgtacctgctgcgcaatcgttttaccgtcaataatttttgctgccatcagagagaggattccatctgtatctttacgaaagggggatggcgatattttgtcagaagccagccccgctgtcagtcttcgtttaagattttatctttctttggcgttgcagaggctgaaaaacgggcctgaccgcgctgcgaatggcgcaaaaaggatcccgggagtcgaagaaaggttaacgtgcagaaacataaggttggataaactttatactgcttttgcggcataagccgccagcctgcacaggcaagcgcagtttcgcggcaaaatacattgactcatcaggcgtggaccgtataattccggcgattgcacatcatgaagctcgcttctcaatgcgcccttagctcagctggatagagcaacggccttctaagccgtaggtcacaggttcgaaccctgtagggcgtaccatttaaaatcaataagttattaacttcctcctctcgctgatgttttctcatggaacacatttgggacatcttctgcaaaaatcgagtcaatttgccttgcgtgttccgttaaatggttaggcgccagctgggcataacggcgtaccatttcgatgctttcccggtagatcaaaaaaacacaatagtctggcaagagatcaatatgtagataatacgaacacagaatgtgtatatctatgtaagatcattatattcaattggttaaaaaggtgttgataattaatatcattaaaaaaatataaaaactttatacaattctaactaaaacgataaaaacaacaaaaaatattactaaccagtgcaataaggggaagcgaagtggatgacgttccctggcgccaacgctttgatacactaaatcattgcttaataaaaagggggcgttatcttttcaaagaaactacctggcgggtcaacatgatgaggtaaaaaatgtatacacctgatgcaatgaagctatcagataaaaagcatatttttgattttattgacacttatagctttggattagtcgtttcacccaccctcaacgccagccattttccttttatcctcgatcgtagttcttcatcgcagggaattcttctttcccatatggcccgtgcgaatcctctatggaaagactttgacggaaagagggttctcgccatatttcaagggccccatagttacgtttctccaacctggtatcaaacttctcccgcggtgccaacatggaactataccgccattcactgttatggcacggtaagccttgtacccgtcaatgaattgcgcacggtgatggatgcgttagttcataaacatgaaccaacccttcaggcgcagaaagacgttatgccaaaggcatttatcgaagaaaattaaaaaatattattggattcaaaattgaaattgaggagtttcaggccaaagaaaagctggggcagcatcgttctcaggccgatcagcgaggaacgctgcaggggttaatcaacagccaatcttcagagtccgttgcgctggctgactatatgcttaaggtgaagaaaggtactggcgtttaaaagcgatacttcgctctattatttatgttggaggaaaatacttacaccttacgtaatgtattgaatcaaccatcccggaaaaacgtactcgcgagcggcttgtcggaaggataatgaaattgaatttgagcgccgcgtttatcagaagaaagcatagggaaacgccgtttaaatcaggggtgagttcggttaaacccggcgacttacgccgccgggaacgccattacttcattgctccctcaaggataagtttgtcattttctccgctggtaatgctctgctgatgaaggctgtcagcgagcgtcacgtcattgacggcgaaaaaagcccaggcctgcggcgtattggcgaacgtcacctcatcaaactgactgtcgtgcaggaaggagatactggtcgctttggtattacggaagctgacgttggaaaaacgcagattctggtgataggcatcgcgagaataggtcagcccaaatgattctgccatttcggctaccgtcatgccgtcaatcaggatgctgtgcttagccgaagtaccatcgacggtgacgtcctgcacctgaacgtcgcggaactgagcgggctcgtcggcaggggtcgtatcattcacgtcggcgctgtatttgatagtaaaaacgaacggctctttggcgatatctttcatcgcattatgacggaacaacacatcccgcaccccaccgccatagtaggggcggcttttcatgcgcaggccgacatcggtcatatacatgacgttatcctcggcgcggacgttttcgatccacgcgccggtgtggctaccggtcaccacggcgccgtggcctttgcggaaatagttattaaagatccacgccccgctttgcggctgttgatgaaacgttttcgcgcctttaccaaacccggcggcgaaattgacgcaatcatctccggtatcgaagaagttgttgaaaaccagcgcattctggctattgccgaactcgacgccgtcggcgttattgccgtcaaaggtctggtggaccaggccattgagggtgatattttttgactccagcaccatcacgccgtgaaaggcggggttgcggatcgtcagcccggcaagatagaggttctgcacgccgcgcagggtcatcaggctggagcggcgatttttataggcgctattgctttcgatgccttccgcaatagccgcttcggtctgatgctttgccagaatgccgtccgcgctgacttttgccgcattgctggcccggtattgcggcagcgcgttccccatttcgtcgatgatggtggcctcgccgccgcttttgacgccccgggtccagccgttgccgtcaatcgtgccttgaccgacgatgcgaatattgcgaaacgtcccggccggagactcgcccttatcgtccgcttccagcacgttaattaatgacggcgggcggcggggctgcggatggtcgctgtagggatagaggtaatagcctttttccagcgggtactgggccggatcgtctgaacccagcagagtggcgccagcggcaatctccagggtcatatcgctgtgcaggaacagcgcgccggttttgaattcgccgtcggaaatcaccaccttacagccctgaggatagtgcgcgacggtgcagctatcgatcgcctgctgcagcgcctgggtattcagcgtggtgccgtcacccttcgcgccgaacgtgctggcttcgatgatgtgcggcgttttgctggtccgcgctttaatcaccgcgctatccggcgactctttgccattggcgtagaccgcgcgcaccgtaaatgcgtattccgtatccggctccaggtgggtgaccgtaaaggtacgcaagtcgattggctgctgccagccgtcgctggcgacccgctgatagaagttatcaatatagggtttggccggtgaaaaatggttttgattttcgcgcgccagacccagccgctcgccctgacggtaaatcgcgtagtccaccacctgctgcgtctctgattccggtttttcccaaaccagcaccaggctattttcatcggcagaaagcgcgggaacgaagacattctgcggcgcggaggcgggcgcatcctgctgattgtcgcgggggccgccgctgtcattacagccgcccgcgaggccagccagcgcgatagccagcgccagcatactgcgtgaaggtccaaaggtattgcgcataaatttcccttaatgtcatatcgcctgtaaaaaacaaaatacaaattcatttaaaataaaatgacattttatatttatggcaaaaaataaacgcgagtcagttcaatctttcagcaggtgaaaaataaagcgttgttggataagaaaaggcggccagggcgttaacctccggcccgctttctctttacggcgcggaatattgaatacgatagccatgcgaggtcggtacgatatgcgcaaatcccgacccgccaaggtgcataccggcaatcagcaggttttcgctgacggcctgggcgaggatcgcttcccgcgtcgctctggcctgcgcgggatcgcaatcaaaagcaacggcggcggcgggtcgggcggtctgaatatgcggaaaatggacgatgtcgccccaaatcagcaggctttgcgccgcggcgtcgatgcgaaacccgctatggcccggcgtgtgcccgggtagccatagcgggcggatacccgcgacggcctcgcgctcatccagaaaaccgaggctgcgggaataggcgtccagggcgcggcgggcgagcgtgaagttgcgctgcccccgcgcattggcccggtttagcatggcgtcgtcctgccagtactcggcttccagagggtgcagataaagacgggcgtggcgatagcgcggcgcgccgttggcatccagcaggccgccgatatgatccgggtgagcgtgagtcagcaggacagtatccacgtcgtctggcgcactccccgccgctcgcagactggtttccagcacgccgcttcccgtacccgcgtcgaccagaatcgtccttccccgaccgcgaataagatagccactaatgtcgatattgccggggtcaatgacgcccgcgctgcgctgaatgtctgcggcatcgtcgatattaatacccgacagcagcgccaggccagcggccatgctgccgtcgctgaggggcgtcacctgaaaatcgccaatctggcgggagagaaaagcgggtttgtgcatatcaacctcttagcgtgatgggggctgtatttcagtcgggctttgcaactgaccggccatgggctcatacatcgagacgttttcccgtcccgccagcagcatgccttcccggcgcggcagaacgtacgccacgcgctgcggcgggttgttatccagcccggcggccgaaaggtttgtcggcggatatcccagttccgactcaacgacgtccagcggctcggggctcagtagcaaaacatccccctcagcgacggcgggaaagacgccgccgtagcgatacaggtttcgccgccagtcgcgaatatgcgcctgccagcgggaaaagctgccgccgcctttctggcgatacgcttcactggcgagcgtatcgccatgctcgatggtatgaatagcaagatagaccgggcagccggaggagagcgccctgaagcgctgcgaggcgcggaatccgctgacggacaccagcgcaggcagcttgtcctcgctgtaaaacctgttccagccggcttcgctttgcgggtcggcgtagctgcactcaacgatatataacatgggctgacctctgcatgatggaatgatgttattgacgtttgatcatgctacgttgggcattaagcgctataaaacgatattatttcaccactcaatgacatttcatcattgataaaccttcagcagaggcggcgttcgtgcgaaaaaaactccccagcagtacctcgctgcaggcctttgaggctgccgccaggcacggtaactttgcccgcgcggcggaagagctgtcgcttaccgaaggcgcgatcagccggcaaatcgcccgcctggaatcgctgttaaactgcaagctgtttgagcggactgggagccgggtgcggctgaaccccaacggcgcgcgctatgcgcaccatgtccgcgagacgctggagcgtcttgagcgagatacgcagtatctgatgggggctgcggacggcagccgaagcctggaaatcgccgcgccgccgacctttgccagccgctggctcattccccgactgggggattttcagcgccggaatctggatatcacgctgaatatcgcggtcagaaccgacccgtttatcctcaccggcagcggttttgacgcggcggttcatttcgagcatcccgcatgggcaggaatgcgcttgcggtttctgtttgaagagagactggtgccggtatgccacgccgggctacttacggcagaagatctcgccagccagctgaacgcgctgccgcgtattcatcgacggcagaatcctgacgcctggcagcgctatgctgaagagtgcgggattgcgctggataatccggcgcagggcgtgcgctacgatctgcatgagatggcgatagccgccgcgctggccgggcagggcgttgcgctggtaccgcacgtgtacgttgaaaaagcgctcgaaaacgggacgctggttgcgccctggccgcaggcccgcagcctgagcaagcgcttttgcctggtgaagccgctggaaaacggcgtcaacgaatcggcgctacaggcgtttgaacagtggttattggcgcaataaggcccggtcgcgggccgtagacgcgttaagcgcagcctcaggcgtgggataaaagcgggaacatcagcttattctctttgaagatattttctttttgtccgtagataaacagaatatcttcgccttcgattttttcatactcgccggtccgattctctttgggggtaaagccgaggatagcctggtacgtattttcatcggcgagctcgttaataatggccgacagggaacgtccgctgtcgcagaaaatatcaaaacagatcagcgccggaccgttttgcatcgcaatcgcgatggcctggtttttgtcggaataatagacgaagtgcttcataaaggcggagcagtagaacatcaataaaccgaagttatcctctacccgcagctgtgaaaacggattcgatttttgatagtaccgctgtaatcgcgcaacctcttccggctggtccatatcgagcttgcggaagtcgcccgctgccggtaccaccggcataatatattgatattcggcggtgcgctcgaagccaaatttcggataaaaatcaacggttgtcgggttagcaaacaggaaaaaggcgtcggccttatcctgccagtccgtcagaatctccctgacgagctgcccggccaggcccttatcacgatgatcgatatcggtcatcacggtgccgatttgaatatagcggcggggttcgccctgccagatcagatcgataatattggcggaggcgttagcaatcactttattgttgctcaccagggcgtagggaatataggcgtcggtccagtaccctttgcggtaccactctttaaaggagagatcgaaggttttaatcgccaggtcaatgaagctatttcttaacacgtcattgtgcacaatttgcttatctaatttgtagttcatcgtcgacattccttacgctgcgggtgaggcactgttttcggccatctgttcggcggtccgatctctgtcgggcgagctaaaaatagcatatccccacggatgggcgacgattgtcgcgcctaagctttgctcaggtcacacattcggggaaaatagggctaaaaatggcgcacttttgtcgcccagggaacatcgccctcaggcaaaagacgcctttagcaaatgaaagtttgccagtcatcaaaaacgaagaggaatatattgcgttcatggtcatgacccctatcattaataggtagggtaaatgtggtatcatcgcgcctttcccttttcgtcctggggctcttttttatgcaacaacctgttgttcgcgttggagaatggctggttactccctctgttaaccaaattagccgcaaggggcgtcagctaactctcgaaccgcgcttaatcgatcttctggttttctttgcccgtcatcccggcgaagtactcagtcgggatgagctcatcgataatgtctggacccgcaacgttgtcaccagtcacgtcgtcacgcaaagcgtttccgagctacgtaagtcgctgaaagatggcgacgatggcagccttgaatatatcgctaccgtacccaaacgcggctataagctgacggtgccggtgatctggtgtaccgaagagggggaggagccgacgccggttatccccgcagaaacgcagacggtcgggtttgacgcgccgttgacctccccgcagcccgatgcggctgcgccagacagcacagcggtggcgaagccggaaaaacgcaagcggctgagcacgtttatcgtctggggtctgttcctgctggccctcgcgagctgcgtggcgctggtggccctgtcaaccctgcagtcgcgcccgccggtcacgaaaacccggctgctgcttaacccgcgtgatgtcgatattcacctgctcagcggcaacacctgcaacaactggtcatcgcagcactcctatgccatcgggctggggagcctgattaccacctcgctgaacaccttctccacctttatggtgcacgacaaaaccaactacaacatcaatgagcctagcagttccggtaaaaccctgaccattgagttcgtcaaccagcggcactatcgcgcacagcagtgcttcatgtcggtgaaggtggtggataacgccgacggctcgaccatgatggataagcgttactttgtcaccagcgacaatcagctttcgattcagaacgacctgctgagcagcctctctgaggcgctgaagcagccgtggccggcgcggatgcaggagatgttaaagcagtatcagccgtcgcaaagtatcgcgcttacccatttctatcaggcgcatcagctattaatgaacggagacgttgattcgctgggcaaagccagtagcctgcttgccgacgtgaataagcagtcgccggactttacctatgcgtgggcggaaaaggcgctggttgacgtattgcgccattctcagcagccgctggatgagaaacagctcgccgatctgtacagcgaaataacccgggtgggtaatatgccggggattaaagatatggcaatattttatcagattaaaacggtggatatgctgggcaaaggaaaagtggatgaagcctatgacgcgattaatgccgggattgatctggaaatgtcgtggatgaattacgtgctgctgggcaaagtctacgaaatgaaagggcagaaccgggaagctgccgatgcctacctgacggcgtttaatttacgcccgggtgagaatacattttactggattgaaaacgccgtattccagacctccgtgacccgcgtggttccgtatctcgataacttcctcgcttcagaataagtaaaccctcatcatggtcatggttttggccgtggtgaggttaaaattatgtttctcatgagccaccgggttgttattttttataacctctccggttccgcatgtaacactttttcaacatgaagttgacctcataacccaatgaaaaacatctaaatttaccttttcctgatatcaacatgtcatcctgatatgttgcgcgaaaaaggtcaaaatatcatttgtctgatgtttgcagttatttcactttatctttaggacttatctcgtactaatccgtaatcttgttggcagttggtcgggtcaataaaaggttcatcatcatgatctgtacctcccaaataaacttaggagaaaagcaaacatgagttctgccaagaagatcgggctatttgcctgtaccggcgtagtcgccggtaatatgatggggagcggtattgcattattacctgcaaacctcgctagcatcggtggtattgccatctggggttgggtgatttctattattggcgcgatgtctctggcttatgtttatgcccggctggcgaccaagaatccgcagcagggtggcccaattgcctacgccggtgaaatatccccagcgttcggtttccagaccggcgtgctttattatcacgccaactggatcggtaacctggcaatcggtattaccgccgtctcttatttatcaacattcttcccaattttaaataacccggtgccggcaggtattgcctgtatcgccatcgtatggatattcaccttcgtgaatatgctcggcgggacctgggtgagccgcctgacaacaattggcctggtactggtacttattccggtggtcatgaccgcggtggtcggctggcactggtttgatgccgcaacctatcaggcaaactggaacacctccagcaccactgacagccacgcggtaatcaaaagtatcctgctctgcctgtgggcctttgtcggggtagaatctgccgccgtgagtaccgggatggtgaaaaacccgaaacgcaccgtgccgctggccaccatgctgggcaccgcgatggccggtatcgtctacatcgccgcgacccaggtgattgcgggtatgtatcctgcctctcagatggccgcatccggtgcgccgtttgcagtgagcgcctccaccattctcggcggctgggctgcgccgatggtttccgccttcaccgcctttgcctgcctgacttcgctgggctcgtggatgatgctggtgggtcaggccggcgtacgtgccgccaatgacggtaacttcccgaaagtgtatggcgaactcgacagcaacggtattccgaaaaaaggcctgctgctggccgcggtgaaaatgaccgcgctgatggtgctgattaccctgatgaactctaccggcggcaaagcgtctgacctgttcggtgagctgaccggtatcgcggtactgctgaccatgctgccttacttctactcctgcgttgacctgattcgcttcgaaggcatcaatgtacgcaacttcgtcagcctgatttgctccgtactcggctgcgcgttctgcttcatcgccctgatgggggcaagctccttcgaactggccggtacctttatcgtcagcctgattatcctgatgttctacggtcgcaaaatgcaccagcgccagaacaacgacaactccgctgatagcagcaccgccagcgcgcattaatcagcaaccctattcctgaggctccttccatcacctgtcacgacgtggcgggaggggctttctttatctggagatttgactatgaacgttatcgcaatcatgaatcacatgggtgtctacttcaaagaagaacccatccgtgaactgcatcgcgccctcgaacgcctggacttccgtattgtctacccgaacgaccgtgaagacttattaaaacttatcgaaaacaatgcgcgtctgtgcggcgtgatcttcgactgggataaatataatctcgaactgtgcgaagacatcagcaaaatgaacgaatacatgccgctgtacgcctttgcgaacacttactcaacgctggacgtgagcctcaacgatctgcggatgcaggttcgcttcttcgaatatgcgctgggcgcagcggaagacattgccaacaaaatcaaacagaataccgacgagtatatcgacaccattctgccgccgctgaccaaagcgctgtttaaatacgtgcgtgaaggcaaatacaccttctgtaccccaggccatatgggcggtaccgcgttccagaaaagcccagtcggcagcatcttctacgatttctttggttccaataccatgaaatccgatatctcgatttcggtttctgaactcggttctctgctggaccacagcggcccgcacaaagaagcggaagagtacatcgcccgcgtcttcaacgcggaacgcagctacatggtgaccaacgggacctctaccgccaacaaaattgtcggcatgtattccgccccggccggtagcaccgtgctgattgaccgtaactgccataaatcgctgacccatctgatgatgatgagcgacattacgccaatctacttccgcccgacccgcaacgcctacggtatcctcggcggtatcccgcagagcgaattccagcatgcgaccatcgcgaagcgcgtgaaagaaaccccgaacgcgacctggccggtgcacgcggttatcaccaactccacctatgacggtctgctgtacaacacggactacatcaagaaaaccctggatgtgaaatccatccactttgactccgcgtgggtgccttacaccaacttctcgccgatttatgaaggcaaatgcgggatgagcggcggccgcgtcgaagggaaagtgatttacgaaacccagtccacgcacaaactgctggcggcgttctctcaggcctcgatgattcacgttaaaggcgacgtgaacgaagagacctttaacgaagcctacatgatgcacaccaccacttctccgcactacggcgtggtggcctcgacggaaaccgcggcggcgatgatgaaaggcaacgccggtaagcgcctgattgacggctctatcgaacgttcaatcaagttccgtaaagagatcaaacgtctgaaaggcgagtccgacggctggttcttcgacgtctggcagccggaacatatcgatggcgctgaatgctggccgctgcgctccgacagcgcgtggcacggcttcaaaaacatcgataacgagcacatgtatctcgacccgattaaagtcacgctgctgactccggggatgaagaaagacggcaccatggatgagttcggtattccggcgagcatcgtggcgaagtatctcgacgagcacggtatcgtggtcgaaaaaaccggtccgtacaacctgctgttcctgttcagtatcggtatcgacaaaaccaaagcgctgagcctgctgcgtgcgctgaccgatttcaaacgcgcgttcgacctgaacctgcgggtgaaaaacatgctgccgtcgctgtatcgtgaagatccggaattctacgaaaacatgcgcgttcaggaactggcgcagaacattcataaactgattgagcaccacaacctgccggatctgatgttccgcgcgttcgaagtgctgccgaccatgatgatcacgccgtacgccgcgttccagaaagagctgcacggtcagaccgaagaggtgtatctcgaagagatggtgggccgcgtcaacgccaatatgatcctgccgtatcctccgggagtgccgctggtgatgccgggtgaaatgatcaccgaagagagccgtccggtgctggagttcctgcagatgctgtgcgaaatcggcgcccactatccgggcttcgaaaccgatatccacggcgcctatcgtcaggcggatggtcgttacaccgttaaagtgctgaaagaagaaaataacaaataatcgatgcacaacagggaagtggcttgccacttccctttttcacgctgcaaggagaacacatgaaaacaccctcacagccgcgcgcgatttattacatcgttgcgatccaaatctgggaatatttcagcttttacggcatgcgtgccttactcatcctctacctcacccatcagctcggctttgatgacagccacgctatcagcctgttcagcgcttacgcttccctcgtgtacgtcactcctattctcggcggctggcttgccgaccgcctgctcggcaaccgcacggcggtgattgccggcgcgctgttaatgacgcttggccacgtggtgctgggcgtggaatccgattccacctggagcctgtacctcgcgctggcgatcattatctgcggctacggcttgttcaaatccaacatcagctgcctgctgggcgagctctacgccgttgacgaccctcgccgcgacggcggtttttcgctgctgtacgccgccggtaacgtcggctccatcgccgcgcctatcgcctgcgggctggcggcgcagtggtacggctggcatatcggctttgcgctggcgggaatcggcatgtttgtcggcctgatgattttcctcagcggtagccgctacttccgccacgcgcgcggcgtcgataaacaggcgctgcgggcggtaaagtttgtgctgccgacctggggctggctggtggtgatgctctgcgttgcgccggtgtttttcacgctgctgctggagaataactggtccggctatctgctggcgatcgtgtgcgtgttcgccgcccagatggtggcgcgcattatggtcaaatcgccggagcatcgccgcgcgctgtggcaaatcgttctgctgatgctgaccgggactctgttctgggttctggcgcagcagggcgggagttcaatcagcctgttcattgaccactttgttaaccgtcgcctgctgaatattgaggtgccgaccgcgctgttccagtcggttaacgccgtggcggtgatggcggcgggcgtcgtgctggcgtggctgatgcggccggaaggcgcgacccgctcggcgctgcgcgtgtggctgaagttcgcctttggcctggtgctgatgggctgcggctttatgctgctggcgcttaacgcgcgccacggcgcggcggaagggcaggcatcaatgggcatgatggtggccggcctggcgctgatgggctttgccgaactgtttatcgacccggtagcgatggcgcagatcacccgcctcaatatgcccggcgtcaccggggtactgaccgggatttatatgctggcgaccggcgcggtagccaactggctggcgggagtggtggcgcagcagaccaccgagtcgcagatcagcgatacggcgattgccgcgtatcagcacttctttgcccagatgggcgaatggacgctgggctgcgtggcggtgattgtcgtcgtcgccttcgccgccgcgtttagcgtcggcaaacgccgcgcggccgccggtgaacttcccggcggcggcgcctagccccgtctggcgacaggtccggcttaccggggctacaaaatcgtgctgcctggtagcccggctaaggcgtttacgccgcgagccggggatcggtaaccccaacagtggagcgacaagccgctccttgcaccgtttactgaacaggaggaggatattctggcaggcgcggaagccgaagataaaaaactgttactgaagcgatggctgagcgaaatcagccagaattgaagccaggctccttaagattgttctttggcgtcgacgccggaacaggccgcgctggagagtggcctggttcaattatcgaagcaagtttgcaagcagggttatgaggaaccaacatgtctgaacaacaagcacaaggtgccgatgaggcaattgaccttaataatgaactgaaaacccgtcgtgaaaaactggccgcgctgcgcgagcagggcgtggcgttcccgaacgattttcgccgtgaccacacttctgaccagctccatgcggaatttgatggtaaggaaaacgacgagctcacctctctgaacgtcgaggtcgccgtggctggccgcatgatgacccgccggattatggggaaagcctctttcgtcaccttacaggacgtcggcggccgcattcagctgtacgtcgcccgcgacgatctggcggaaggcgtctacaacgaacagtttaagaaatgggatcttggcgacatcatcgccgcccgcggtaagctgtttaaaacccagaccggcgaactctccattcactgcaccgagctgcgcctgctgaccaaggcattgcgcccgctgccggacaagtttcacggcctgcaggatcaggaggcgcgctatcgtcagcgctatctggatctgatctccaacgaagagtcgcgccacaccttcaaggtgcgttcgcagatcctcgccaccatgcgtcagttcatggtcgcgcgcggctttatggaagtcgagactccgatgatgcaggtgatccccggcggcgcctccgcgcgtccgtttatcacccatcacaacgcgctcgatctggatatgtatctgcgcatcgcgccggagctgtatctgaaacggctggtggtcggcggcttcgaacgggtgttcgaaatcaaccgcaacttccgtaacgaaggcatctccgtgcgccacaaccctgagttcaccatgatggaactctatatggcgtatgcggattacaaagatctgatcgaactgaccgaatctctgttccgcacgctggcgcagaccgtgctggggaaaaccgaagtcccgtacggcgaccaggtgttcgacttcggcaagccgtttgaaaaactgaccatgcgcgaagcgatcaagaaataccgtccggaaaccgagatggcggatctggataacttcgaggcggcaaaagcgctggcggaatccatcggtattcacgttgagaagagctgggggctggggcgtatcgtcaccgagattttcgacgaagtagcggaagcccatctgatccagccaacctttatcaccgagtatccggcggaggtttcgccgctggcgcgccgtaacgacgtgaacccggaaatcaccgatcgtttcgagttctttatcggcgggcgtgaaatcggcaacggctttagcgagctgaacgacgcggaagaccaggcccagcgtttccaggatcaggtcaacgccaaagcggcgggggatgatgaagcgatgttctacgacgaagactacgtcaccgcgctggaatatggcctgccgccgacggccggtctgggcatcggtatcgaccgcatggtgatgctgtttaccaacagccataccattcgcgacgtgattctgttcccggcaatgcgtccgcagaagtaaatcccgctaaaaccaggtcccctcgtttccctgaaccggggggcccttatttcgacgtgtttaattccgacgagtaataattgcgaatcagcttactccggacaccttatgtgctataacagcgcgcataaaaaacataaggtgttaattaaatgaaaaaaataaaattaattgttggtggcgtgatctgtgcaagttatttatttacgtcagtgttatcaatggcaagtgataatatcaacaaccataccgttcattttgataaaggcagcaacggcacgataataaaaagcaccgtgaccggtgacggcgttaacgactatacgctggaggcgaaagcgggccagatgatgcatatcaatatgaacagccagcggccgcatccttatttcaatgttatcgctcctgataataattcgatttttaacggttctctgagcggtgatacctttgaacaacgtctgatgagcagcggtaaatatacggtgcgggtttatcagatgggcggcgcgcgcgatgaaaggaaaaccagcgcttacgcgctgacgtttaaaattaccgactaatatttggcggctgtctattcaggctgtcccggaggcggcgcgctgcgcctgtccgggctaccggcccgcagacggtggtgaacccgtagcccggtcagcgcagcgccaccgggaaacaaagcgcagagtggctgaatttcccggaggcgatgctgcacatctgtccgggctaccggcccgcagacggcggggaacccgtagcccggtcagcgcagcgccaccggggaaacaaagcgcagagtgttgcagaacgggcctgttcccgggttaaagcccttcggtgacgatttttgccgccgcggctaacacctctttgcggcttttcgcatcctgctgcggctgggtaaaataggtcaccagcaccagcggggcatgattttccggccagatcaccgcgatatcgttggtggtgccgtaatctccggcgccggttttatccccgaccgcccagcttgcgggcaggcctgcgcgaatgctttgcccgccggtggtattgccttttagccacgtcactaactgggcgcgctgctgttcgcccagcgcattgcccagcgtcagcttgcgcaggctttcggccatcgccaacggggtggtggtatcgcgcttatcgccgggaatcgcgctgttcagcgccggctccgtacgatcgagacgaaaagtgacatccccgatactctgggcgaatgcggtcaccttttccggtccgccaaggtagctaatcatcttattcatcgcggtattgtcgctgtactgcagcgccgccgcgctgagttccgccagggtcattccgctttgcagatgtttttcggtgatcgggctccagaccactaaatccgattttttaatctccagccttttattcaccacctctggattgctttcgctctgttttaacaccgcggcggcggccatcactttaccggtgctgcacatggcaaaacgttcatcgccgcgatagagggtttgcgaatcatctgccgtgttaatcagcgctacgcccagccgaccgccggaacgtttttctaaatcagccagcttttgctggatagcatcggcactggcccataatgaaccgctcgccagcagcagcggaacggcggcggcggccatcagggcggttttacgccacgaacttttcaacatctcagactccttgatagtgatgagctgcccggactatccgcgactcccgcgcttttgacaagcactatgtcgatgatggaattccatcataaattcgttattcgtcctcctctgcgcctgcttatagtgtctctccccggcaaaataaaatcaggagccgttatgttcccgtcacagttaccaaaaccgcgccatcccgccgcctcggcgatcccctcgctgcgttgggccattattggccccggctggattgccgagcgctttgtgaaatcgttaaaagagctcagccgccagcgggtggttgccgtctcctcgcgcacgcagcaaaaagccgacgatttcgccgcccgctgggggatcccgcaggcttatgctcaggtggatgagatgctggcgcgagcggatattgatgcggtttacgttgccacgccgcataaccaccactttcccgacgggctgcgggtgctgcaggcgggcaaacatgtgctgattgaaaagccgtttgcgctgaaccggcgggaaggcgcggcgctgaaagcggaggccatgaagcaggggaccctggcgatggaggcgatgtggtgcgactacgcgccgaagtatgacgtgattcgccagctgctggaggacggcgtgctgggcgatctgcacacgctgctcgccgatcacggcgagttttttaccccggatcatcgcatttttaatgccgatctcgccggcgggccgatgatggatctcggcagctatctgacctcattctgcgtgatggtcggcggcgtgccgcaggacattatcgcccgcgggcgtcccgcccaaagaggcgtcaacgggcagatttcgatgctgtttaactgggaaaacggcttacagggattgctcaataccaccctgttcagcaacacgccgggcggcgcggtggtggccgggcgcgatgcgacccttaccctcgacgggcagttctacgcgccggggaattttaccctcgccgccagccagggcgggcaggtgctgcgctgggaggagccgcgcaaccgctacgaccagctgttttatcaggccgaacattttgcctggtgcgtggggcaagggcttacggactcgccgatccgcccgctggccagggtgctggaaaacctgagcgtgatggacgaagtgcggcggcagattggcgtgatatttaacgaggagcgttaacggcgcgccgttgccccgtatgccgaccgcatacggggcttttttacgccagcggttcgacgctgacaaactgcccttgccgcagggaaagcacggcggcttcggcgatagcctgcgcccgcagcccgtccagcagccccggcaggtccggcaccgcttctccgcctagcgagcggacaaaagcatccagatgcgcgtagtacgacccctcgacgcgactgaaccagtccggatagaggccgggctgaatgcagcgcgctccctgccacagcgtgacgccgcgcgatgcctggctgccggactctatcactccctgcgggccaagcaggctaatgcgctcatcgtagccgtggccggtgcgccgggtgttgtccagctgcgccagcgcgccgccgcgcatccgcagcatgacaatggaggtatcgacatcgtcgaattcggcaatttccgccagcgccagcgcagcccccagcgcggcgacggtcgtcacttcatcaccggtaagaaagcgcagcaggtcaaagaagtgaatcgcctggtcgcgcatctggccgcctgagctgcgcagatattccagcggcggcataaccgatgcccgacacaccatctgaaccagttcgattttgccaatcgcgcccgcctcgatctcccggcgcagctgctggtggctggcgtcgaagcggcggttaaagccaacggtcaccggtaccccgagcggcagcactttctcgacgacctggcgggcgcgggccagcgaaagatcgatcggtttttcgcagtagaccgcttttcccgcgcgcgcggcggcttccagcagcgccgcgtgtgaaggcgtcgagctggcgatcagtaccgcgtcaatggcgtcgctattgatggcttcggcaacggttaccgcccgcgcgccgtagcgggaagccagcgctttcgcccgctcgggatcggcgtcggccaccatggccagaagggttcgctcatggcgagctaggctggcggcgtgaacctggccaataaaaccgctgcccaacaatgcaaaacgaatgcaggtcatttttttctccagaaagagggatttagcgttgccaaagtaatccgtttgctacactgaccgacacgggcgttttgatggatttccatcatgggggagacgagacgatgaaaagcatttcgctggaggcgctggctaaacggattggcgtgggcgtcgcgaccgttgaccgggtgcttaacgaacgcggcggcgtgtcgccggaaaccacgcgcagggtgctgcaggccgcgcgggaggccgggctgaagcgcattctgccggaagagcgccgtctcccgtggcaaatagaagtgtttctcagcgataacgattcgcgctttttctcccgtctgacgcaggatttcgccgacgtggcggatagccttggctatcgccggctgacgctgcaccgcacgctggtggcggagtccgcgccggaaaagctggcgaaaagccttatccgcagcagcaaaaagcgccatgcgataattgtctttggcaacgaacatccgcgggtctatgacgccttgcgccagtgtcgcgaggcgaacgtgccggtgattacgctggtcaccgatctccccggcgcgcagaggctttgccacgtcgggatcgatcagcagcaggccggccgcaccgcgggcatgatgatggggttaatggcgcaccggtctggagaagtgctgatgctcagcgggcgccaggacttcagcgctcatcgcttgcggattcagggatttcgcgaggtgattagccagcgctttccgcatctgctgctgggcgaggttttggcgggggaggacaaccgacagcgaatcgaccgcctgctggaagaggccctgcgccgcaaccgcgacgtggtgggcatctacaataccgggctgggcaacacgcaggtggcgcaggcgctggctcgccatcgccgctacggcgagtgctgctggatgacccatgaacgctacagcaccacccgtgaacagctggcccaggggggaatggcgctgacgatcgatcaaaacccgcgccagcatgcccgtctggcggtggagctggccctgcgccatctggaaaccggctatcagccgcatctgttcagcgacggcaaggtcgaatttatcctttacagcgctgaaaacgtcgactgagcgcccgcggcccgcggggcgacatccccttttacaccctatctcctgtctcgttttaaaccgctgccgctatcggcgcgccgcgcggcaaaccgtcgcctgcctctcattttttgcgcatttatgcgtcaatgttagatgtgtgtcaaagttctgttaacacgcagttttaaaattttcatttcagttatttacttataaaagtttcatatgtgttgttaatgaaataaacggtctggaatttttcttcctctataaatggactaatgtttcaaaaaaccattttaaaacaactgaattttgtgatttcgatcaacaacaaaaaatgcaccagcgcgcgggctgttttttcaaaaagctggaaaagcaggcgcttaacgcacaattaatgaaactattttttcattttaccttacctaaccgatgtacctgaaaataaaggatcaacgatgaatattaagaaaacggttgttgcctctttgatagcctgcatgctgccagcggtcgtgatggcgaaagatatttcggtcggtgtttccatggcgctattcgatgacaacttcctgacgattctgcgcaccgcaatgcaaaaagagatgcaaaaagatggcgttaaggcgcaggtggaagatgccaaaggcgacgtctcccagcagctacagcaggtacagaactttattggccagggcgtcgacgcgattatcgtcaacccggtcgacaccaacgcggtcaaaccgattatggaccaggcgaccaaagcgggcattccgctgatctttgttaaccgccgcccgcaggcgcagctgaccgacaaaatggcctacgttggctccgactcggtgctggcggggcgcttacagatggaagcgttagccaaagcgatgaacggcaaagggaacgtcgccattctgctcggcgacctggcgaatgaatcgacccgtgaccgcaccaaaggcgtcgaagaggtggtggcgaagtacccggatatcaaaatcgtgcagaagcagaccgcgaaatttacccgcaacgatgccgttgacgtggtcagcaactggatgaccagcggcgaagacattcaggccatcgcctccaacaacgatgaaatggccatcggcgcgctgcaggcactgggtaaaaacccgaaccatatcctgatagccggggtggacgggacgcccgatgccctgcaaatgctcaaaaacggcaagatgatcgccacgattttccaggatgccaaagggcagggcgaaggcgcggtggatgccgccattaagctggccaacggcgagaaagtggaaaagatcatcgacgtcccttaccagctgatcaccaaagacaacatggctgagttcgttaatcgcaaccagaaatagtcgctcagggtacggaggtgaagtatgaacgcttttgcacttgaagccgaagggatcagcaaattcttccccggcgtgaaggcgctcgacaacgtctcattacgcgtgcgcccggggacggtgcacgcgctgatgggcgaaaacggcgccggaaaatccacgctgatgaaatgcctgatcgggatctaccgtcccgataagggcgcgatccgcgttaaaggggagccggtccagtttcaggatacgatggacgcgctgcgcgccgggatctcgatgatccaccaggagctgaatctggtgccgcatatgacggtggcggaaaatatctggctcggccgcgagccgatgaaatacggttttgtcgatcatcgccagcttgcccgccagacgcaggatctgctggataaactcaatatccggctatccgccgaccggctggtgggggagttaagtatcgcctcccagcagatggtggaaattgccaaagcggtttcgtggaacgcggatattgtgattatggatgagccgacctcggcgttaaccgaaagcgaagtggcgcatctgtttaccattattcgcgatttacgccagcagggaaaagccattatttatatcagccataaaatggatgagattttcgcgattaccgatgagatcagcgtatttcgcgatggcacctgggtcggcagtaaacataccaccgagtttacccgtcagtcgctgatcacccagatggtcggccgggagctcacccagctctttcccaagttcaataacgccattggcgaagaggtgctgaccgtccgcaatctgtcgcgcaagggggtctttcacgatatcaactttagcgtacgccgcggcgaaatcctcggcgtggcggggctggtgggggccgggcgtagcgaagtgatggagagcctgttcggcatggataaagccgatagcggcgaagtgctgattgagggagtaccggtcacgattgactcgccttcgacggcgattgaaaaagggatggcgctgctgacggaagaccgcaaaaagtccggactgtttctcgtgctgtcggtgctggagaatatgagcatcgtcaaaatgccggaatatatcggtaaaaccggctttgttcagcacctcaaaatggccgaagactgcatggagcagatccgccgcctgaatattaaaacccccaccatggatcagattattaataacctcagcggcggtaatcagcagaaggtactgattgcccgctggctgctggcccagccgaaaatactgattctcgatgagccgacgcgcggaatcgacgtcggggcgaaagcggaaatttaccatctgatcagcgagctggccaaccgcggcgtggcggtgattatggtctcttcagaattgccggagattctcgggatgagcgatcgggtgatggtcatgcatgaagggcgtattaccggcatcctcaataaagaggacgccgaccaggaaaccattttgtcgttggcatcccattgaggcacagagaatgagcaatatgaaaataacggcgaccccgatcactgagaaaccctctttctttgggcaattacgccaccggctgccgaaagataccgggatatttatcgtcatgctggtgattgccctgacgtttgaaattgccggctggtacgtccgcgaccagtcctttttattaaacaccaatcgcctgatattaattgttttgcaggtagcgattatcggtattatcgccgtcggggtcacccaggtcattattaccaccggcattgacctctcctccggctcggtgatcgctctcgccgccgtggtggcggcaagcctcgcgcaaacctccgatagcctgtcgccgatgttcccgtcgctggtcaatatgccggcgattatcccgattggcgccggcatcggcgtcggtcttctgtgcggcttaaccaacggctttctggtgacccgcaccggcatcccgccgtttatcgcgacgcttggaatgatggtgtcggcgcgcggtctggcgcagtactacactcagggcaacccaatcagcttcttatccgacagctttaccgccatcggccagggggcgatgccggtgattattttcttcgtcgtcgccgcggtcttccatatcgccctgaagcatacccgctacggtaaatacgtttacgctatcggcggtaacatgacgtcggccaaggtctccggtatcaacgtgaataaatacctggtgatcgtctatgccatcgccggggcgctctccggcctggcgggcgtggtgctggcggcgcgcgtcagcagcgggcagtcgagcatgggcatgtcctacgaactggatgctatcgccgcggcggttatcggcggcagcagcctgatgggcggggtggggcgcatcaccgggaccttaatcggcgcgatgatcctcggcctgattaaaagcgggtttacctttgtcggcgtcgacgcctacgtgcaggatattatcaaaggcatcattatcgtcgcggcggtgactatagatatgcgccgcaaccgcaaaaagcattgattttttatggcctgcagccgctatcgccgtaggccataaattattttaaataagaatttacttaatccagttcacacttttgttcggtcgccattgtcattacgcaggggcgcttagataatccgccgaaataacccatttttatgatggcgtgctactgcgaaagcaggcaagaccaaaatagaaatgctctcccgccaaggggagcgtctctgttttggtctttttttttgccccaacaccagggaacactatgaactataacgaaacagcagacaaaatcctccacgcggtgggcggtgcggagaacatccgtatgctcacccattgcgcgacccggctgcgcatggagttcaacgaccgcgcaaaggttaacgatgcgcagattggcgcccttcccggcgtgatcagcgtagtggagaagggcggccagttccagatagttatcggcaatgaggtgcagcaggtttaccgacggctcaataaggcgctgccggagaaaaaaggcccggcaggcggcgataaaaacgcgaagccggccggcatcgtcgcccggattatcagcgttatttcgaccacctttaccccggtgatcccggcgattaccggcgcggggatgattaaagcgctgctggccattctcaagctcacgggggtgattagcgaaaccagctcgacgtatcagctgctgaatattattgccgacgccgccttcttcttcctgccggtgctgctggcctacggcgcatcgctgaagtttgaatgcaacccgattctggcgatgaccctcgcgggcgtgctgctgcatccgggcatcggccagatgctggcggccggtaaagcggtggattttgtcggcatcaacgtcctgctttccgattacgccggttcggtgctgccgattattctgaccgtgtggctgatgtcgtgggtggagcgcttcgccgaaaaagtgtcgccatcgattatcaagtttttcgttaagccgatgctgattctgctgattaccgcgccgctggcgctggtggtggtcggcccggcgggcattttgcttaacgatctggtcgccgccggggcgggcgctatcgaccgccacgccagctggttaatcccgatgctgatgggcaccctgcagcccttcctgatcattaccggcaccgcctgggcgatgacgccgatcgccaccggtcagctgagtaaaagcggttacgagatgattaacggcccggggatgctggcctcaaacgtggcaatgggagcggcgacgctgtgcgtggcgctgaaaaccaaaaatagcaacctgcgccagctggcctcttcgtcgggctttaccgcgctgctggggatcaccgaaccggcgctgtacggggtgctgctcaagttccgccgggtgctgattgccgcgatgatcggcggcggctgcgccggggtctacgccggggtgagcgggctggtgcgctacgcgtttgtctcgccaggcctcgcggcgctgccggcgtttatcggcgaaaacccgatgaacatcgtccatgcgctggtgacctgcgcgatttccatcgtggtgacctttaccctgacctggtttatcgcttttaaagacgttcctgaggaacaagacgcggtgagcgagacgccgcagcctgcggtcagcccgacaagcgagggggggaccgaagtcttcagcccgctgcgcggccaggtggtggcgctcagcgacgtgaacgacgacgtcttttccggcggcctgctgggcgaggggctggcgattcgtcccgaagaaggggtactgcgcgcgccgtttagcggcacggtaatgatgtttctgccctcctgccacgccgttggcctgcagagcgacagcggtgttgagctgctgatccatatcggtattgataccgttaatcttaacggccagcactttagctcatcgctgaaggtgggggatagggtggaggcggggcaggttctgatccgctttgatattcccgccatcaaacaggccggatacgacctgattaccccggtgattgtggtcaacggcgatgggcagcacgctctgcgcctcaccgccgccgcgcaggtggattacggcgaacccctgatggtgcaatccgttaaggaggcgcagccatgatttatcaacagcaggcccggttcccggacggttttctgtggggcgcgtccacctcagcctatcaggttgagggggcgtggaatgaagacggtaaaggaccgtcggtagtcgacatgcttagccatccgccgggaacggcggacttccgcatcgccagcgaccactatcatcacgtggaggaggacgtcgcgctgatggcgcagatggggctgaaggcctaccgtttttcggtggcctggtcgcgggtgatacctgacggcgatggcccggtgaatccggatgggctggccttttatcaccgcctgatcgacgccctgacgcgccacgggatcacccccatcgtgacgctctaccacttcgacctgccgtgggcgctggagctaaaaggcggctggctgaaccgcaaaaccggggaggcattcgtgcgctatgccaggctgctgttcagcgaatttgccgccaaagttccgctctggctgaccatcaacgaacagaacaccatgattctgcatcccggcgcgattggcgtgcccgccgatcgtgaactgccggataagaaggcgctgtaccagcagaatcatcatatgatgctggcccaggcgcagatcttcgccctgtgccaccgtgagttccccgggctgcgcatcggcccggcgataaacaccacgtcgatgtacgccgaaagctgtaagccggaggacgccatcgccgcgcataactgggagacgctgcgctgctggagctttttggatgttgcggtgcatgggcgctacaacgccctggcgtgggcctatatgcaggatcgcggccttgcgccggaggtgcagccggaagatgcgctgattttgcagcaggggaggccggactttatcgccattaactactactcgaccgccaccattgccgccagccggggcgacggcggcgacgttgcgccccgcgcgggcgatcagcaaattatgctgggcgaagagggggtttatcgtccggcggaaaatccgtgggttggcaaaaccccttacggctgggttgttgacccggtggggctgcgcctgacgctgcgtaaagtgtgcgagcgctacggtctgccgattctgattagcgaaaacgggatgggcgcgccggacaagctggagcatgacgggacggtaaatgacgactatcgcatcgccttcctcgacgcgcatatcgcacagatgcggctggcgattgccgacggcgtcgagctgatgggctactgcccgtgggcggcgattgacgtggtcagcactcaccagggatacgccaagcgctacggttttatttatgtcgatcgcggcgaggatgacctgaagcgcctgcaaaggatccgcaaacgcagcttctggtggtataaggatgtcatcgcgcagaacggcaaccacgacgagtcgcagagatgattgttcagaaggtgctcaataatagcctcgtgctctctatggacgacgataacagggaggttatcgtcatggggaaaggcattggtttcaatagcagacccggggacgagatcgccccggagaagatagagaagctgttcgtgacccagacgctcggcgcgcgcagcggctatcttgaggcgctctccgccattccggatgaggtcatcgaaatggcggcgatgattatttcccgcgccaatctgcagctcgccggcaaggttcgcgagcagattttctttaccctcgccgaccacctgacctttgccatcgagcgcagccgtaaagggatcgccattcaaaatcgcctgctgccggaagtcaggcgtttttatccgcagcagttccgcgtcgccagcgaggcggtgacgattattcgccagcagtacgggatcgaactgccggaggaggaagccgggaatatcgcctttcatctggtaaacggccagagcgagggcgacgacgtggcgcagaccatgcagtcggtgaaaatgctgaaggatatttttaatctcgtgcagtaccactttaagcagcagatagacaccgaatcgataaactactcgcgctttttggtccatatgcagtttttcctccagcgtttacaggagggggagctggacggcgcgcgggacagttttctgctggtgcaggtgattaaggcgtatccggacgcataccgctgcgcgctgctaatccgcgattacgtcaaagcccagctcgatatcaccctcggcggcaacgagctgctgtggctcaccgttcatctggtgcggatcgcgggactggatgcgtgattgtgttcttttaatggggcgtaatagctatttctgttttttttatgggacatgagctctttggaatgactgagttggctcatttgtagtgttctataaacaggttataatcgctaactacgttctattaataagacaagagaagcattatggcaaagccgtcaacccgaacctactctcgttacagtcgcgatgcagcacggttgctgggaatgatgatccgcaccgcacgcatagaatccagactcactatcgaggagctggcagaacgtgctggcgtgtcgcgtgggctggtttatcgtgctgaggaaggcgatatgggatgtgcgattggcgcggtatttgaactggcgacaatagtgggcgtgccgctgtttacgccagatcgttctgctctggcgttacatattgctaatgcagagaaaacgctgtcattaatgccgcgtgcggttcatcactcaaggaaggtgataaatgatgacttctgagaatagccttgagcaagtgtatgtctggatctggctgcctggagcaacagaacccgttgtcgccggagtgttaagcagagacaacggtcggtttattttcaactacggccgcagttatctggagcggaaagaggcgatagcggtttatgtgccggagcttcctttagtcagaggcgcaattgtacctgcccctggtttgcaaatggctggcgcgttacgcgatggagctcctgatgcctgggggcggcgagttattctgaaccgactgatgggcgcacaaggcagagagaccgatcccaacaccctggatgaaatgacctacttacttgagtccggttccgatcggattggtggtcttgattttcagcgctctgcgacggagtacgttccacgcgcggcccgaggagcatcgcttgaagagcttatgcaggcagcgtcgatggtggaaaacggtataccgttaaccgtcgatcttgaacaggcgttatttcacggcacttcactcggtggagcacgaccaaaagcgatgatcgaatttgggaatcgtaaatttatcgctaaattttcttcttcaacagatacctataatgttgttaaaggcgaatatatcgccatgcgcctggcaggctgcgttggattgaatgttgcgcctgttctctttcgccatactgctggtaaagatgttttgcttatcgagcgttttgatcgcgtccaaagcaagaccggttggcaacgccgcctgatggtgtcagcgctgactatctttggtcttgatgaaatgatggcaagatatgcgagctatgaagatttggcggacattatacgtcagcgttttagtgcccctaaagagacgctgcgggagctgtttgggcggcttgtttttaacattatttgtggtaataccgacgatcatgccagaaaccatgcggcattttgggatggtaaaaggcttagcctgacgcctgcatatgacatttgtcctcaagggagagccggcaatgaagccacgcaggctatgctgatcgtaggcgaaaatcggatgagtaaccttgcggtttgcctgtcggctgccgaccgttttttactgagcagacgtgaagccattgagcttattgcccattatctcgatacggtccatatgaactggaaagccctcggcgatgaggtggggttaagtgaagtggacagaaaactcttctggggaaggatgtttttaaatcctttcatatttgaaggcgcgccagaagagattttgagactacgtaagtcgtggctttaatgcgtccggtgccactgcattttcaacgcggcaagacaaatagtccgttaacgcgtttcgataaccttttaaacctccgtagtatcaccgatgccgaaactgcagcgtcgccggcaggtagcgctgtagcggttcaggcgtgttgccctcgatcaactgactgattaaatcgtagcagtgccaggccagctggcggttgtcctgctgtacggtatcaatacgcagcgacagcgaatcgtagagatagtgatcgtcaaaacttgccaggtggatgtctgaatccagcaaatggtgctggctcatatagcgcagcaccccttccagcagaccacaggcggcggtaaacagcgcctttggcggccggcccaggcgcgcgcagagggcggcgaacatctcatagccggagctggggtgatagttgccgttgatcacccactccgggcgcagcgcaatgcccgcctgagtcagaccctgcgtaaacccggccaggcgatcgcgggagggcgacagacgcggctggccgcctaaaaaccagaactcatcgtgatgctgaggcgcgatgcgggaaatcagctccgccgtcggggtaatcgaatcggtcatcaccagcggcagcgcgctttcagtaggacagcggtcaaacagcaccaccggcagctgttcgctgagcttcaggtagtcggcatcgctgtgcatacaggaggcgacgatcagaccgtcgacctggcgggcaatcatgttattgaccaccatgctctcctgaccggggttttcatcggtacaggagatcagcagctggacgcccgcttcgcggcacagcatctccagctcatgggaaaagaccgcaaagccgtagttggtgatctccggcaccaccaggccgatggtgtggctgcggttatcgcgcagcgagcgggcgtgaatgctcggctgatagtgctgctcgcgggcaatcgccagcacgcgctcgcgcgtttcctgcgccacgcgcagctccttgccacgaccgttcagcaccaggctggcggtcgctttggaaacgcccgccagttcggcgatatctttaatggttacgcgtttggttttcattacgacgccatgagcctgaaagcaaaacgcttattctatcatgcatgttcgcagcggccagtagcagaatgcatccggcgcgctgccggagaaaatcagctgcgccggataatcggggaagcagcggctgctcatcaccccctcgccgtcgttgatgaaaatctccacgctcgaccgatcgatgaaaatccgcagcgagcgcacctcgccgcgccagtagcgatagtgcatttcgtcgctggcgaggctgcgtcgcgccagacggataccgctggcgtcgcgctccagggttaacgcgccgccgaaatcaaggcttagcgcgtcgtcgccggcggtttgcagggcgatttccatcggcgccagcggcagtgcgttcccctgccagccgtgtgcctccccgcgcagggcggtcagctcgcgcagcggacgctggtagagccggccgtcgataaattccagctcgcgcaggcaggtcatctggtggatccagccgctggcaagcgtcggctgaagcatctcttcaccgtccgggacgcccatccagccgaccagcaggcggcggccatcgctggtgtgcatggtttgcggggcataaaactcaaacccggcgtccagttcgtgcagctcgccgtgtttgaacgcggcgcggtcgtagtcgacatcgccgctcatccataccgccggataggtattgaggaagcgctcgtcttcgcgggcaatcccctgcgggcagcagatcagaatatgctggtcgccgagcggaaacagatccggacactcccacatatagccagcgtcgtcgaggccattgaggccgtagccggcgatttcgcccttgctgcgccactgatgaaggtccggggagctgaacagcagcaccttaccgcgcttttgccgatcctgcgctcccagtaccatgtaccagcggtctttatgccgccagaccttcgggtcgcgcacgtggccggtatagccctccggcagcggcaggaccggaccgattttgcggaaggtaccgtcggcgttttccgtcgccaggcactgccacgcggttcggccgccgtcgtcaaacttcacgttgccggtatagcacagggtgagcgtaccgttgttatccaccgcgctgccggagtagcagccgttgcggtcgtactcttcatccggcattagcgcaataggctcatgccgccagcgcagcagatcctctgaactccagtgcgcccagcacttgaacttatgatcgcaggcaagcgggttccactggtagaacagatgatagcgcccggcaaactcgacaaagccgttggggtcgttcatcagcccggtcaccggcgcatggtgccagcgcggataatggctatcggccagcgcgcgcggctggccctgcataacggcctgcaaaatcgcaggcagacgtgatggtagtgacattattcagcgtccgttttgtatttcagcagcagagagacgacgaaagcgacgccaaaggcgatgaccatgccgataatgtagttcagcagcgagctggcctgcacgatggccatgccgggaatcgccgtcaggccgactgcggtcatatagacgtgcactgacacgacccacgcgccgcccgccgcgccgccgatcagcgccgcgataaacggcttcatgaagcgtaagttgataccaaaaatcgccgcctcggtgatgcccagcatagcggaaaacgccgagggcagcgcaatggctttgattttgacgtctttggttttaaaccataccgccaggcaggcgccgccctgggcgacgttggccatggaccagatcggcagcaggaagttgaccccgatggacgggttgcccagcagtccggcttcgatggcgtggaagctgtggtgaataccggtaatgacgataaccgaatagagaccgccaaacagcagcccggccagccagccggcgtggctaatcagggtgctgaggacaaacgaaatgccgtcgccgagcgcgcgaccagccgggccgataatcagcagggcgataaaaccggaaataatcaccgtcaggaacggcgtcaggatcaggtccagggcatcggggatcgtgcggcgcagctgcttctcaacgatgctcataaaccacaccgccagcagaaccgggaacaccgtcccctgatagccgatcatggcgatttcgaggccgaagaagttcatggtatggaaaccggcggccacgccccaggcgttagtcagcgccgggtgggtcagaatgccgccgagcgtcgcgccgagataggggttaccgccgaattcgcgggcagcggtaaagccaatcaggatcggcagaatgataaacgccgccgaactgcacatatccagcatgatgtagagggcgttgctcggatcaacccagccgtaggttttgaccatccccagcaggcccatcagcaggccggaggcgacgatagccgggataatcggtacgaagatgttcgacagcaggcgcgcgatgcgctggaaaggattaagctttttcgccgcgatgtcggcggcctccgatttgctggattcgctaatacctgccgcctgaataaaggcggcatagactttattcaccaccccggtgccgaaaataatctgcatctgcccggcattgcggaaacagcccttaaccccttcaattttgccgatagcctgctggtcggccagcgcgtcatcgaccagcaccaggcgcaggcgcgtggcgcagtgcgcggcgctggcgatattttccttgcctcccagaagcggaagcagcgagcgggaaatctgttcaaaatccatagtaccctctgaatgcgtaaaaaaattcgtgttgtcgtcccgcgctaacgggggcgcagtctctgcgtcgttattgtgtccggggcgatgaaaggcgcgtcgtcgccccggaggggcctgtcgtcaggcattcaccgtcagaaccaggtttccatctgcataccgaacgaccattcgccgcccgaggtaaaaccattgctgcccagcgcgtcatcgctggcgtaattattcagttttttgctccagtccatccacgaggtgtaaaggcggatttcagggcggctgaagaaatcaccgatgctgccgaccttaaatgtcggggcgaaggtgagcttgtagaagctaccgtttaccgcatgacgatcgttataaccttcgggtttgagatccatatactggtagctgccttcgtaagcgagagcgaagttctggttgatctcctggatcaggcgcatgttgagcgtggcccactgatagctgtcgccatcggcataacggcctttactgctttgcgccaggatcgccggggcgatagaccagttttcgctgagcggggtggtgccatagctggcgaagcgccaggtgttggctcccgaccgtagcgcgccgtcagagccgatacctttaacttccgcgcccaggccgtgaccgtagagcagggcggttttgctggtgccttcacgcagaccgtaaaaactgtcgttgtgcaggccgagcagcgtatgtaccccggtatttgccgcatcgcctttgaccgggttaccgttggtatcctgacggtcgtcgttgtcttttgcccgcatcccgctgaccatcacctgcaccggaccgatgaagttgtttatgctgaggatatagttctgcacgctgttgctcgagtcagcaatatcgccgaaattgcgcccgtaaagcgagaggttgctgcggatgctgtcgttccacctgacgtcgtaaataccgccgccggtaccggcgaggaacacaacgtcagagtcaatccagtgaatatcaaagttgtcgcggtcgaagcgtttcccggcccacagggtggagcctttaaacgcccctgtgaaggtgggcaagttgcccagttcgacaaaggcctgacgaacgttcaaatcgctgctgcttgccgtccagtcgttataagtggtttgtccgtcggcgaccatcactttgaaacgggtcgtcgcgccattatccagggtctgcttgtgttcaaggttcatttcaacataggtatccgcctggtttcccagacgaccgatagccccgccggtttcccccgctggcgtcatgtaggcgccggatttggtgctggcggcggaatcattcattatcacgccggagcgggcgtagccgtgaaactcaaagccgcttttctcatcggccttcttctcgagtttggcggtacgttgaaccacttcctgcgtcgtgtcctgatttttctgctgctgcgcggtgagctgctggacctgtttctctgccgactcggcgcggttttccgcagtctgtgcccggttttccgcctcctgcaggcgtttttccagggcgatcaaacgggcttcgatcgtgctgagatccgtttgcgcgtgggctgaggcggcgccggttagcaaagcgataaggacggcgagtgtgctttttttatacatgctggttgcatcccgaaaggaaaatgtaaaatgttgttttttgctaaaccggtttaggcgctatgttaaacacgacccttaacattttgaaatggattttgctaaaccggtttaataaatgtgatggatgcaacaaagtgggccgcgcgcggcggcctgaaggatcaaaactggcgattaagatcgcgctggtatggcagggcggtcatggcgcctttcgccgttgtcgccagggcgccgcaggtttgcgccagcgtgagcgtcggttccagcgcagcgatatccgtcggcatcccgttggcagcaaggcttgcgagcagtccggcgacaaatgcgtcacccgcgccggtggtgtccacgctgacaacgggcttggcgctgaaatgggtaaactgctgctgaaaggcggcaagtacgccggctttgccctgggtcaccagcagcagttcaggctgatagcgttcggtcacgctggcgattccgtaggctaaatcatcactgccgctgatgaataccagctcctcttccgacagcttcaccacgttggccaagcgcagggcgcgatcgaggcaggcgtgcagcagctcctgatcctgccagaggtccgggcggatattggggtcaaagctgacccggccgccggcatgtttgatgctttccatcgccgagaaggtggtgctgcggctgggctcggcgctgagcgcgatggagcagacgtgcagccactggttggcggtaaactgcggcaggtcttcttccgccaggaacaggtccgcgctggggcgcaccataaaggtaaaggtacgttccccctgatcgtccaggtcgaccaccacggttgaggtacggtgctggccgtcgaggcgcatatggctgacgtcgacctgctcttgttgcagggtatggcgcataaagcggccaaacggatcgtcgccgacgcggccgataaatccgctgtcgccgccaaggcgggcgataccgaccgccacgttagccggggcgccgccggggcagcgcagcaggcggccttcgctctccggcagcaggtccactactgcgtctcccagaacccaaacttttgcattcatgttgaaaattctccatagctaaacttaattaaaccggtttagcacattaaagcatagcgacagaatgaggggaacgtcacgggcggaaaagtgccaatcagggcataaaaacgtgagctggttagcaaaagagtgatgattcggcctggcgggaggggcttccggtggcggcgggcgagatggcggcataacgcggtaggccggagaggcgcagcgcgccgcctccggcaaagccccggagagaggggacttcagggcttgatgtgaaacgccgcagccgcttaagcccccgccgccagaccgtcgataatcacctgcatcaccccctgagaacagggctcgatgcgcccgcgcacgccgtaaaccgccgccagagcctgcggggtaatcacctcggccggcgcgccgtcccccagcagttgtccctctttcaacatcagcacgtgatctgcgtggcgcagggcgatattgatgtcgtgaaccaccaccagcgtgatgatgttgcgcctctgcgtctcctcacgcaccagatccatcacgtggaactgatagtttaaatccagcgcgctaaggggctcatccagcagcagcaggactggctgacggataagcgattgcgccaggccgacgagctgcttctgcccgccggatagccggtcgaggtagctcagcgccagatgttcaatgcctagctggcgcagcagcgacatcacctgcgcctgattttccgggctgtgcgctcctccggcggcgcgttgagcgacaataatcgactccagcacccgcaagtgcacgccggcgggcagcgtctgcggcaggtagaccactttttccgcacgccgggcaaaggggagggcaagcagattctcaccgtccagcgacagctcgcccgcggacggccccagcccggccatcgcccgcatcagggtggattttccgctgccgttggggccgagcagcgcggtgattttaccgcgctgcagccgcggtaccgtcaggtcacggatcacctgacgtctgggataaccggcgctgaaatgggtcagcgccagtccggatacaacatggctcatacgtgtccccgatggcgcaaaatgatgctcaggaaaaaaggcacccccaccagcgaggtgacgatacccaccggaatcactgcgccgggaatcaggttttttgccgcaaccgaagccagcgacaggacgagggcgccgattaacgcgctggccggcaggtaaaagcggtgatcttcgccgaaaaccagcctggcgatatgcggcgccaccaggccgataaaaccgattgggccaacgaacgccaccgaaatcgccgacagaacgctgatgcgcagcagggtggtcaggcgcaggcggcgcacgttgatgccgaagctgacggcccggtcctcgccgaggcgcagcgcggtcagcttccacgcgctgcgcattgatagcggcatgacgaccgccagtatcgcaagcaggatccccaccttttgccatgaggcgcggtcaatgctgcccatcgtccagaacaccagtccctggagggtatcttcgttggcgacaaactgcagcatcgataccagcgcattgaaggtgaacaccagcgcgatcccgaacagaatgacgccggaggtggcgacctgggtccagcgcgtaatgccgtccagcagcagcgccgccagcagggcgaagataaaagcgttggccgagacaaaccactggccgggaaccccgggaattcctatccccagcacgatagccagcgccgcgccgaatgccgccgccgaggagacgccgagcgtaaacgggctcgccagcggattgttaaggatggtctgcatttccgccccggcgaggccgagagccaggccgacgacgatcgccatcagcgcatagggcatgcggatatcccagacgatcgcccgcgtcccggcgctggcgctggccgggtcggtaagggtttgccaaagcgcctgcagcgacaggccggatggccccatcacgaagtcgagcagcagcgaggcgacaatcaacagcgtcagcagcagcagcatgatggcgcggcggcgcacaatgtgacggtagtttgccattacgtcacggctatcgacgccgaacgcgacgatatcggattcaggagagagactcatggctaattactcaccttgttgccaggaaaaaacaaacggcagatcgggcagggtggtgaaatgacggacaatgtagtgccagctatcgtcagggttgaggtcgctgaaggtctggggatagatatccttcgccagatacgccataccgacgatattccacggatggttgtagaagtggtggtaaatgccgtaagcgcgttttgcttcaatcgtcgggatgttgctcacgccggtgcgcgatagcagccgctccgcctggcgattgacctcctgaggatcggcctgtaaaccgagcggcagcacctggctattcccgcgttttgaaccggtcataatataggcatccggcttcatgctaatcactttttccagcgacacaaagccggaagcgcccggcagcagctgcgagccgatattgttcgcgccgacggcttcgaccagaccgccccagccgttgtggccgtgggtaaagcagcaggcatcgctattacccgccagcgcctcgacaaaaacgttagccttcggcgtgatgttcgcggttttctggcggatggcgtccagctgctgacggtaatagtcggtataggctttggcgttttcttcacggttaaggactttccccagcagatcgatactcggggcggtgtctttgccggggttgatttcataatcgacgaacagcacgggaatattcagcgcgctgagcttgctgatgacaccgctctcctccagcgcgggcttcgcgcgaagctgggcgatcatcaggtccggctggcgggaaatgacgctctcaaggtcaacgttgcccttatcgctaaagcccatatcgaggatctgagcggattgcggccacttctcttgcagcattttccaggtattgatgtcctgttttctggccaggttattccatgccacgacgcgcctgaaggggttgtcgcggtcgagcagagccatggccataatatcgcgaccatcctgcaggataatgcgctgtggctcatgctggagcgtaatcgcgcggccgtcgagatcggtgacggtgagcggatattgcgcggcaaagctacagagaggagtggaaatcagggcagtaaggatgaacgaacctactgattttcttgccataatatgcgttccgtttgctaatttataaatataatgattctgagaattattctcgtgtaaacataaacggcaagtatatcaacggcaaatgacttaaaatgtaacaaatttgttggaatttattcgcgcaatcagaagcgggacgcggcagaccaaaagtcgatagaaaagtccgaaatcagttttaagaacaatccctaaagccagacggtaaaatcttgtgccatgctaaatgcgactcataacattaagttcgttagcgagagaggacattatgaaaaaagcaatgattgcgttatctgcgattctggtagcagctcctgtttttgctgcaacaacgacacacgcaaccgacgataccgtcgcggcggcccatgaaggggcgaacaccgcgaaagaaaaactgcacgaggcccagcaccagggtgaagagcagcagctgaaagccaaacacgcggcagaaggcaaaagcgacagcgtaggcagcgaagtcagcgaaggcgcgcagaaaacctggaataagaccaaagaagggactgagaagggctggaacgcgactaaagaaggcaccgaaaaaggctggaataagaccaaagaggtcagcaaagaaggctgggataaaaccaagcagggtgccgaagagctaaaaaccaaagtcactgagtaatctctggctattttctaaaaaaggtcgcgaaagcggccttttttgttatttggtgcgctttgttcagcgtcgggataatatttttaaaacgttatcatgctctcgccctggatttttagccgcactacggcggcgaatttataagtccccgggagcaccggttgccaggtgaacggggggaatgcacgcagccaggacatgcgccttaaaagatgaaaggtataagccaggaattgtcctggttatattgttactcactattcctccacattttcccggtacaaaggaaatatatcaggaggtgtattatgaaaaagattctttcactggcgattattctatcttgtgctttgacttccgtctcctgggcggatggccctggcggcaacaaccacggtcagcagcaggtctggcagcaagacgccggccgcggcggcccggacggcaaccgtcagcaggggccgggcaaggggccgcaggccaacaaccatcagggtaacgacgataaccgtggcccatcgcgcggtgacaaggggccgcagggtaactctcatcaggagcgccatgagcgggaccacttcgcgtggaacggccatgattttcgcaaaggtcagccggctccggaacgttatcgcggcaatgattaccggataaacgactggaacgatcgcggattaccggcaccgccgcacgggcagcactggtcctatattgacggtaactatgtgctgattgccgccgcgaccgggattattacgtcgatcctgattaacggcgcgctgagtcactaaccttttctgctttaacctcgcaaccgcctcccccggaggcggtgctgtgcacctgtccgcgctaccgatttgcccgcgtctgagggacggtagtccggccagcctggcgctatcgggcactgcccacccgcccctgttctcacatcaaatccgcttaaaaaccgcaaagttgaaaatatcatccttgcgcctcttctttgatgttttatctgcttatttaggctttataaatgagtattgtgcttcatggttaataaaaggcagagaatgtaagacgtttcatggttcaggtgatagtaaaactcatccgcttcgccgttaaatcgctatgaataaatcagatgaaaaccccgcgcggaataagaaatcctgcttgcaataaacccttagcacgttaagttattaaagcttagcacctgattctatatcccggagaccggcatgaccgactgtgtaattcctgaaattaaagccaccgaagatgaaatgattgcgatccgtcattatttacacgcccatccggaattaagcctggaagagtttaataccagcgagctggtggccggaaaactggccgagtggggctatacggtgacccgcgggctggcgaaaaccggggtggtaggaacgttaagcaagggcgattcgccgcgcactatcggcctgcgcgccgacatggacgcgctgccgattttcgaagcgaccgatctcccctgggccagcaccgtggccggaaaaatgcacgcctgcggccacgacggccacaccaccattctgctggcggcggcgaaatatatcgcctcgccggcctgccagttcaacggcacggtacacctgattttccagcccgcggaagaagcgatcggcggcgcggatttaatgatcaaagacggcctgtttgagcgctttccctgcgagcgcatcttcggcctgcacaatatgccgggcctgccggtggggaaaatcggcttttacgccgggaattttatggcctcggcggatacggtaaaaatcaccattaccggctacggcggccacggcgcgcaccccgagcgcaccgtcgatcccattgttaccggcgcggcgctggtgatgaatctgcaaagcatcgttgcgcgtaacgtaccgccgggcgaaaccgcggtggtgagcgtcggcaccttccaggcgggtatcgcctccaacgtcatccctgagaacgtggtgatggagctgagcgtgcgggcgatgaagccggaaattcgcgacctgctgattaagcggatcaaggagctcactgattttaccgccaaaagctacggcgccagcagcgaggtagcggtttttgactcctatccggtactgaccaacagcgtcgaagagaccgaattcgccaaagcgctggcgctggacgtctttggcgaggagggcgtgctggaatccatttcgccgatgaacgccagcgaagatttcgcctttatgctccagcagcgccccggctgctacttcctgctgggcaatggcgagaaaggcgggaagggcagctgtatggtgcacaaccccggctatgactttaatgatgacattatttctaccggcgcgacgctgttcgcccggttagttgaaacacactgccgttgatctctggagtccgtaaataatgaaaaaatctcttctgctgtgggtcgcgctgatggcctcaacttcagccctggccgcagaaaataaggaaattcgctttggcgtcgatccgactttcgcgccgtttgaatggaaagatccgcagggtaagctggcgggttttgatattgacctcggcaacgcgatttgcgcccagctgcaggcgaagtgcgtgtgggtggaaagcaacttcgacggcattattccggcgctgaaggcgcgtaagttcgacgcgatcctctccggcatgtatatgaccgagaagcgtaaagagcagatcggctttagcgacaagctgtacaacggcccggtgttcctcgtggcgcgtaaaaacaccctggccgggaataccgtcgagcagctgaagggcaaaaccatcggcgtagagcagggctcggcgcaggagacttacgttaaccagcactggcgcacggcggggatcaatatcgtcgcctatcagggggcggatcgcgtggttcaggatctggagtccgggcgtattgacggcgcggtgctttccgggatgatggccgactacagcttcctgcagcagccgcagggtaaagattttgccttcgttggcggccacctgaaggacgacaagctgttcggcgccggcgcggcgattggcctgcgcaaagaggacgatgccctgcgccaggagattaacggcgcgattgccactattctcgccgacggcacctataaaaagttagccgggaaatattttagctttgacgtctattccgggacataatgttgttatgcattcagcgggcacggatagcccgcttcaagcttccttttcttactatcccgtaattgtccttttctggccctcacggcgttccgaaggatactgaatataagcgataaggagtgaacggcatgatgacacgtcccttgggcaaaaccggattttccatcgccccgctggtgtttggcggtaacgtttttggctggaccattgatgaaaaaaccagttttgccattcttgatgcgtttatagaccacggcttcgatgctatcgacacggcggatgtctactcccgctgggcggatggcaaccagggcggcgagtctgaaaccattatcggccgctggctacaggcgcggccaggcatgcgcgataaggtaaagctcttcaccaaagtgggttccgatttaggccttcccggtcataaagggttgaaaaaagcctggatccagcaggcagtggacgactccctgcgacgtctgaataccgattatattgacctctatttcgcccactggccggacccggaaacgccggtcgccgaaaccctcgacgccttccacgccctacagcaggcggggaaaatccgcgccatgggcgcctcgaacctcgatgcgcagcagctttcaggcgcgctggaggtgtcgcgtaaaagcggcctgccggcctggcaggtgctgcagccggaatacaatctttatcatcgctcggcttttgagggcgcgctctgcgacctgtgcatcagccgcgatatcggcgtggtgacctactacagcctggcgtccggcttcctgaccggcaaataccgccagcagtccgacctggcgcaaagccagcgcgggggcggtatcggcaaatatctcaatcctcgcgggctgcgtattgtcgataccctggttgaagtggcggagcaaagcggcgctaaacctgccgaggtcgctctggcctggctgatgagccgcgacggcgtgacggcgcccatcgccagcgccaccagcctcgctcaggtggagagctttgctcgcgccgccgcgctgagcctgagcgccgggcagctggcgcgtctggataccgccagcgcgtagtgattgaggccggagcctgtcgggttccggccttttgtctctccgcgttttgctgcgcgcgcttcctcaccttcagcccaaacctctgcggcgaatccctttcagcgaaaaatgaaacgtttttccagacggcaaaagccaggcttgattacgataagataatgagtatagttctcattcttcttcttgtttgcggttttatcaggagataacctgcgtacgtcgcgggctcacagggaaacggcgaaggcactggatggggctcacaggcgcaagaccggaaacgcgaatttcggcggcggagccactatcggatcgttgattttgttcaggactgatcttatgaaacgcactctcccggcgctggccgtctctgccaacttaagcggccgcgccgcaccggctttcccgctgcggaaaacgctgctggcgttaactgttggcgctatctcccattcggcaacggcggcggaaaacgtcgccgaacgccagaaaagcgaagaaacgatggtcgttcaggccgcatccgccagcgattttaaagccggcggcgacctggtggtgcccgcctatcttgacggccagatcgccaacggcggccgtctcgggatgctcggcgaacaaaacgcgatggacgttccgtttagtatcatcggctttacctcgaagcttatcgaggatcagcaggcgaaaaccatcgccgacgtagtgagtaacgatgccggggttcagccggtgcagggctacggtaactacgccgagacctaccgcattcgcggccttaaatttgacggcgacgatatgaccctgagcgggctggcgggcgtggtgccgcgtcaggtggtggataccgccatgcttgagcgggtcgaaatttttaaaggcgccaacgctctgcttaacggtgcggccagctccggcgtcggcgggatgatcaacctggagcctaagcgcgcggaagataccccgaccgcccgcgtgggcgtcgactatacctcggattctcaggtcggcggcacgctggatttgggccgccgctttggcgacgacaaccagttcggcgcgcgggtgaatctggtgcaccgcgaaggcgaggcggcggtggagagtgataagcgcagaaccacgctggcctccatagggctcgattatcgcggcgaacggatgcgcagctcgtttgactttggctatcagaaaaaaaccttccacggtagcccgatgggcatcaacatttcgggcgtcgattttattccgcgcctgccggataacacccacaactacacgcaaaaatgggcttacagcgatatcgaaaatgagttcggtatgctgagaatggaatacgacattgtcgataaatggaccgcctacgccgctctgggggcgcagcatgcccatgaaatcggtctctatagcgcctcgaagctgattgaccgggcgggcaacgccacggcggggcgcctggacaccaaccgctatatggataccgccagcggcatggccgggatacgcggcgaattcgctaccggttttgtgtcgcacaaggtcaacgtcggctattcggcgaaaacccagaacgacaaaaccgcgtggcggatgtcgaaggcggcggataatccgctggtgaatatctacgatacccgtccggttgcgcccccggcgaacgcatcattcggcggcgactatggcgatccgctcaccagcggccgcacccgttcccagggctggctgctgagcgacaccctcggcgtgctggacgatacgctgctgttcaccgtcggcgcccgtcatcaaaaagtggtggtgcgcaactacgataaagtcaccggcctgcaaagcgatgcgtatgacgacagccgctggatgccgacctatggcgtggtctataagccgtggcaggttctctctttatacgctaaccataccgaagccctgcagccgggcagcaatgcgccaacctccgccgctaactatggggaaagcgtcggcattattcactcaaaacaaaacgaagtcgggatgaaggcggattttggccgcattggcggctcgctggcgctgtttgaaattaaaatgccttccgccttcctggatagccagaaacgctatggccttaacggcgagcagcgcaatcgcggcgtggaatttaacgtattcggcgaaccgctgtacggcctgcgccttaacgccagcgcgacctggctgaaagccgaactgtcgaaaaccaaggatggcgtcaatgatggtaaaacggccatcggcgtaccgggcttctacgcggtgcttggcgcagagtatgacatcaaacctatcgacggcctgaccgccaccgcacgcctcaatcactcgggttcgcagtatgccgaccaggcgaacagcaagaagattgatagcttcacgaccctggatctcggcgtgcgctatcgtctggcgcttaacgagaaccagaatcagatgacggtacgcgcgggcgtcgataacgtgacggatgagaactactggtccggcgcggacgacagcggaacctatctgttccgcggcgaaccgcgcacgttcaaggtttcggtcggctacgaattttaaggcaaaaccgcaggagcgggcagggcggctcgccggttgtaataaatcaatgaatgtataaagccaaggcatctgcggcttgaagtatgacgattttataccctaaataattcgagttgcaggaaggcggcgacgcagggaatccccaggagcttactccagtaagtgactggggtgagcgagaaaagccaacgcacatgcagcttgaagtatgacgggtataagtgttaaaaggtgccccttcatatatacacacaggggatcgacgtgaaagacgcgtcaacgtcgtcggatgccgtagaggaaagcggcccgacgcttcatcgcggtttacagaaccgacatattcaacttatcgcccttggcggcgccatcggtaccggcctgtttctcggcatcgggccggcgattcaaatggcgggaccggccgtactgctcggctatgccgtcgccgggatagttgcctttctgatcatgcgccagctgggcgaaatggtcgtcgaagaaccggtttcaggctcctttgcccactttgcttataaatactggggcccgttcgccggttttctttccggctggaactactgggtgatgttcgtgctggtcgggatggcggagctgaccgccgccgggatctatatgcagtactggctgccggatgtgccgacgtggatctgggccgccgcgttcttcatcattatcaacgccgtaaacctggtgaacgtgcgcctgtacggtgaagcggagttctggttcgcgctgattaaggtgctggcgattatcggcatgatcggctttggcctgtggatgctgttcggcggccacggcggcagcaaggcgggaatcgataacctgtggaaacacggcggtttcttcgccaccggctggcacggcctgatcgtgtcgctggcggtgattatgttctccttcggcggactggagcttatcggcattaccgccgcggaagcgcagaacccggaaaagagcatcccgaaagcggttaaccaggtggtatatcgtatcctgctgttttatatcggttcgctggtggttctgctggcgctctatccgtgggtggaaatcaaatccgacagcagcccgttcgtgatgatctttcataatctcgacagcaacgtggtggcttccgcgctgaacttcgtgattctggtagcgtcgctgtcggtttataacagcggcgtttactcgaatagccggatgctgttcggtctgtcggtgcagggcaatgcgccgaagtttctcgcccgcgtcagcaagcgcggcgtgccggtcaactccctgctgctatcgggagtcattacttcgctggtggtgctgcttaactacctgctgccgcaaaaagccctcggtctgctgatggcgctggtggtagcgacgctgctgctgaactggattatgatctgcctggcgcacctcaagttccgcgccgcccagcggcgcaaggggcgcgagtcgaagtttaaagcgctgctgtcgcccgccggaaactatatctgtatcgcctttctggggctgatcctggtgctgatgtgcaccattgacgggatgcgcctgtcggcgattctgctgccggtgtggatcctgttcctgtttgtggcctttaaaaccctgcgccgtccggcgtagcgcgatcgccccgtcgtccggcggggcattatctctttttattgtgatcgtcttcgcgcttagcgtattttacccgcgatcttctttttgtaatcgattactttttatttgagtgtatttgtaatcgattactttttgagggcggtcgaaatggtcacaacaaccgaaggtcgtgaaagtccccgcgtagcccaccgttttctggtgccgcggctgtcgttaatgatgtttatgcagttctttatctggggtagctggtcggtgacgctggggctggtgatgacccgctatgagatgtcgctgctgatcggcgatgctttctccgccgggccgattgcgtctattctctcgccgtttgtgctgggaatgctggtcgatcgctttttcgcttcgcagaaggtgatggcggtgatgcatctggccggagcggttattttgtggtttgtcccgcaggcgctggtggcgcaaaacggcgcgctgctgattggcctgctgttcggctacaccctgtgctatatgccgacgctggcgctgaccaacaacatcgctttccacagcctggcgaacgtcgataaaacctttccggtggtacgcgtcttcggcaccatcggctggattatcgccggtatctttatcggcgtcaccggtatctccgataccaccggcatttttaccctggcggcgctctgctcggcggcgttggccgtttatagcctgacgctaccgcacacgccggcgccggcgaaagggacgccggtccagtttcgcgatctgctgtgcgccgacgctttcgcgctgctgaaaacgcgccacttcctgattttctccctctgcgcgacgctgatttcgattccgctggggacctactacgcctataccgcctcttatctggcggatgccggcatcgcggacgtcagcaccgcgatgtcgttcggtcagatgtcagaaatcttctttatgctggtgatcccgctgctgttccgccgcctcggggtgaaatacatgctgctgatcggcatggcggcgtggttcgtgcgctacgccttctttgcgctgggggtcagcgaagaggggcgcttcctgctctatctcggcatcctgctgcacggcgtgtgctatgactttttctttgttgtcggctttatctataccgaccgcgtggccggtgaaaaagtgaagggccaggcgcaaagcatgatcgtgatgttcacctacggtatcggcatgctgctggggtcgcagatctccggcgcgctgtacaaccatctggtggcaggccagagcgtaccgcaggcgtgggtgaccttctggtggatcccggcggtggccgctgcggttatcgcgctgattttccttttctctttccagtacaacgagaaagagcagcgttaatttttcaggaggtggtatgaaaacaatcaaaggaccgggcattttcctggcgcagtttatcggcgcgcaggcgccgtttaataccctggagggcctggcgcagtgggccgccggtttgggctatcaggcactgcagatcccctgtaaccatccggcgattttcgacgttgaacgcgccgccgcgagccagacctactgcgatgaggtgagcggtatcctggcggaacagggcctggcgatctgcgagctgtccacccatcttgaggggcagctggtggccgttcatccggcttatgatacggcctttgacgcgtttgcgcccgccgcgctgcgcggtaacccgcaggcgcgccagcagtgggcggtagaaaaagtacgccaggcggcggtggcctcggcgcgtctggggctgaaggcgcatgccaccttttccggggcgctggcgtggccttatttttatccgtggccgccgcataatcagccgcttctcgatgaggccttcgatgaactggcccggcgctggcgaccgctgctggatgtttttgacgaacagggcgtggatgtctgctacgaaatccatcccggcgaagacctgcatgacggcgtgaccttcgagcgtttcttgcagcgggtcgataaccatccgcgctgcaatatgctctatgaccccagccaccttcatcttcagcagatggactacctgggttacatcgatatctatcattcgcgaatcaaagcgtttcacgtcaaagatgccgaattccgccgcgacgggcgcagcggggtctacggcggctatcagaactggcagcagcgggcggggcgttttcgttcgctgggcgacgggcagatcgacttcaaaacgattttcagcaagctcaccgagtatgattttgacggctgggcggtgctggagtgggagtgctgcctgaaggacgcggaggtcggcgcgcgcgaaggcagcgagtttatccgccgccatatcatcccggtctccgggcgggcgtttgacgatttcgccgcaggcaaggagggggaataatgattcaggtcggcattattggctccggatttatcgggccggcgcatctggaagcgctgcgccgggtgggcgacatcgaggtggtggcgctgtgtgacggttcgctggagatggcgcagcagaaggcgcgccagctcaacgtggcgcacgcctacggtagcgttgaggcgctgctggcgcatcccgggctacaggtggtgcataactgtacgccgaaccatctgcatgcgcggattaaccgacagatcctctccgccggactgcacgtcttttcggaaaagccgctctgcatgaccgcggaggaggcccgtgagctggtggcgctggcggaaagcgccggggtgattcatggcgtcagctttgtttatcgccagtttgccatggtgcagcaggcggcggcgatgatgcgcaacggcgatgtcgggaggctgtttgcggtgcacggcagctatttgcaggactggatgctgctggagaccgactataactggcgggtggattcggcgctgggcggggcctcgcgggcgatggccgacattggttcccactggtgcgatacggtgcagtttatgaccggccgacgcattgtggaggtgatggcggatctctccatcgtctggccgacgcgccaggcgcccgtggccggcgacgcgacgttcagccagcatcgcgatgatatcgcgtatgaagcgcggcccgtcgataccgaagatttggggtcggtcctgtttcgcttcgacgatggcagcaaggggagctttatcgtttcgcaggtcagcgccgggagaaaaaacggcctgacggtggagatcggcggcagccgctgctcgctggcctgggatcaggagctgccgcagcggctgtggattggccatcgccaggggccaaaccagctgctgagcgacgatccgagcctgatgctcggcgaggccgccgccagcgcccacttccccggcgggcataatgaaggctggcccgatgcgtttaaaaatatgatgctgagcttttatcaggcggtgcgcgccggtgagatgccgccggcatcgtcacggcgtttcgcctcgttctacgagggggcggacgtgatgtacatcattgcggcgatagtgaaaagccatcagcagcagcgctgggtgaaggtggaaagataagccgaaggcgcggtgcgcatttcgcgcacccgctgggttatttcacgccaaaatagccgtcgagatacgttccggccagttcattaccgaacagcacggcgtctttattttccatttcgttatcccatttatcgctgacgttgccggtaaatgcgtgctgggtttttgtgccctcagccacctgctgcctgattgcgtcggcggtacggcgggcgtcgctttcgctcatccccgactttctgtcctgctggccgcgggcatagatatcggtaaagttcggcagatttaagcggtagttttcctgacggttactaacgaagttaccgccgacgaaatcgctgcggtgtgagacaaaatagtaagcgtggcgttccggggaagattttgaggaggtacagccggaaagggcggcaagcgaacagccaagcgcgataaacgctatttttagtttcattgatatcatcatccataattattagaaaaggtactctgataattcaggtacaggacaaaacggctaattatgtctgtacggtagcacctgaagacccatgaatccaaggggcttcaggcagcattttttagatctgcgccagcccgccatcaacgtagatttcagcggcgttaataaagctcgcgtcgtcagaggccaggaaagccaccgttttagccacttcttccggctcgccaatgcggcccagcgggacgtcggcggccagcatatcgaagagcccctgacgttgctctggggcgacaagtccccccagaccgggcgtacggacgggccccgggctgaccacattcacgcggatagcgcgcgccttcaggtccagcgcccatgagcgggccagattacgcacggcggccttactggcgctgtacacgctgaagttcgcggtgcctttcaccgccgccgtcgagccggtaaggatgatggaagccccctgggtcaacagcggcaaggccttctggacggtgaacagcacgccgcgcacgttggtagcgaaaatgcgatcgaagtgctcttccgttatggcgcccagcggcatcatatcgccgccgcccgcattggcaaaaagcacatccactcgccctgattcgctggcaatggtcgaaaacaccctatcgaggtcgcttaataccgaggcatcggcgcggatcccgctggcggcgggaccgattaacgcgaccgccgcgtcaagctcttcctgacggcgaccggtgatatagaccgtcgctccctgcgaggccagctcccgggctgatgccaggccgatgcccgaggtgccgccggtgactaacgcgatttttgccgaaagttttttactcatggtgcacttccttaactaaagtatgaatatgccaattgagtcatccacttaccgtgactacctggcgactgagtacgggggtcactctaccgtcagccacggatgcaaaaaacggagtaatgtgaaaaacactcttcataccggtgaataatcagcggctattatcaggaaaaatgaataatggatcggttttcagcccttaaagtctttacgcgcgttgtcgaagccaacagttttacccgggccgcagactccctgaatatgcccaacgccactctcagtaaagcgattcaacagcttgaatcgcatcttggcgtgtgcctgctgcagcgcacaacccgacgcattaccgtcacgccggaagggcgtgaatactatgaaaaagcggtgcgaattctgaaagatctggacgagattgatgcctcatttcgcgcttcccgcaataagccaaagggccacctgcgcgtcgcggtaggcggctccaccgctcgcgacgtgctgatcccgctgctggctgattttatgacgacctatccggatatccgcatcgatctggcggtcgctgacagcccctcggaccttatcagcggcaatatcgactgcgcgattagaggagggccgctggacgactcgacgctgatcgcgcgcaaaatcggcgaagcaacgattgtgacctgcgctacgccgggctatttcaggctctacggcattcccgcgtatcccgatgagctgaagaacggacatcggctggtcagctatttatctcccgccagcggaagagccttcccgttccgctttctggataacggcatcagtcaggagatcaaaacggaacatcaccttggcgtaaatgagagcaacgcgcatatcgcggctgcggaggctgggctgggtattgtgcagaccttctcatattcgttgagaaatgcgctggtgaacggaacactagtggaaatactcagcaaatggcgcccggccccttatccctttcacgtggtttatgcgcagaatcgccacgtcacatcccggctgcgcgtatttatcgactggctggcggaggcatttccggcagcggtaaaagggggctaaatgagaggaaccaacatataatggcagcctgtgaaaaatattcatcgtgtgattataaatcaagtaacaataaatattacgcccgcttacagtatggggatatatttttctatataatatgacatggttaaattcagtgggtgttttattaaaatatttaatgaaatgtgttaatgttatttgccctaaggtctggaattatagattagtcttttttttctttgtttacagtaaatataatagcagcaatttattttgtttatagtatgtttggtattacgtatgtatcttttttgaaagtattttttagccactcaagaggtaaatataatgccggcaggtaaccgtgagattaaatgtatggcgtgtggtttaaactgccctattgaagcggaagataaaatggagcgatccctttgcggagagaggaagttttctgtatggccggataaaaactatttttttaagcgagcggtcaatgatttggtttttcgtgaactcacctgttttctgcctgaaggaatggtggtggtggacttctccctcgacaatatcttgtattttctgcatgagggctgggctgaaaaactgcaggagaccggtctgaagattattttactcgcggataaaagcatgctgcccatggctaatttttggatgctccgctccggattattatggtcggtggtggaggtcaacgatagcttgagcagcttaatcaagaaaataaaacgcatcatgctggggcggaatcttcgctgtcggcgcaccccgtcgctgactgagcatgaaatgaagacgctgcgcctgctggcagacgggcattccagtcaggatatcgcccgcatcatggcatgcgatacccgcagcgtctaccgctttcaatactctttatgcaagaagttcggcggactcaatcgcctgcgcgagctgcgcttcaggcataccatacccgctctggattagcagcgcttaacccggcgaatctataaaacagccgtttcctaactgatgatagcggcctaatgcgacaatatatttcctgtggctattgttcgcttcggggcctgtccagctctcccctggtagcatataaaattgcgttgaactttcatcgtcaccattgcagcctttctgcagaatgactctaaaataggtgttgccggtgtttttaatggtgcccgtggcttcgttaatttcatactggaatcgcgtcttgcgggggcgcacgatgagaatcgtgctcatcgacaccgaagggacaaccgccatttttttctgatccatgcgccaggggaaaaccgtgacgggcgtttccttaaagatcacccgataatatcgctcaacgtcatctttgggcccgcgataatagagtttaaaatattcctgacctttggcctgtacggtgaactgcagcggcgaccagaccaggtctttgctctgaccgggcaccggtatttcatcaccgttgcccggccgggagattttgtaagccgaaatggtatataagttagtgctttttgtatcgttgactagcggccgggagataaaatctttactggcatccatatcataaatgatggaatcaaagtacaccgcggaagcgggctggacacacagcccgcacaatccgatggccaggattttttgcatcataccccccgatcgacgccgacccatgtggcggtcacttttacatccccggtggcgctgacggtccccatccagtcatgtccatcggtggtgaactgtgaatgcgggtcatccatcggaaacagcagtttcagcgtggtggtaaaaaagaaaccatcgttgacgttagcgttccaggccgtctgtacccaggcggcgttggtcatatcgacagggttttcaccgcagctgttgcggacttttaccgctttaccggcagcggacgtccattcgaggtaggccgggatggggacttttagcgtctcgtccgctgaggtaaacaggcagtacggcagaccatatatgttgatggagtcgccgatgacctgggcggtaatactgtcggcctgacgcgacgcggaggtggtgactttatattcaaaagtgatgggctcttcgctaccgatcttgccggatgctttgggatgagaacgcccgtcgctggcaacaatgctgataccgtattcccgcgggatgatgttaattaatgtggaaggcgtgaactgataataacccgattgcggggtgacggagttatcaaaatagaaggtaaacagttcattcttgttggttaaatccgttcctgccttgagggctttttggaaaaaggcattggacaggaatacgtagacgtactcgcctgacggcttgaaaaccttgttataggtaatggcagtaccgaaattagtccagctagccccatcaccgctgtactttacgtcagacgaagaaggggaaaatcccagcatcgccgtgtcgataaccatccggaaatcaagtgaggtggtgagggttttggtctcctgaaagttgtaagacaccattttacaaatgatcccggaagcgctcccgactacgcccatctggcacaattcagagccgaggttaacgcttggcgtaccgtcgctggcaatccacacttccgccatagatccggtactgtttaaggtcagatgcgagaccttttcgaggttcatcgtatagtaaacccactttcctccgctggggagatctttacagcgaacgccggaagcaaagtcataatcggctttggagtccatatagcagagattaagctgcaaactatcgatggttcccaccggctgattgcgaaaatactcataggccgactggctcagcactccggcgccgtagtaaccgtttgctacgctgttgccggacatcgcgtgatagtaaccgtctttgtcgaggacatccgcagggatatagccggaagccgggcagtttgcgccagtagacatgcagcggagcccgagaaacggttggttaatgggggagttgtcgatccagagatcaaaatagcggttactgtaactccagcccgagttgcccagatatcccagactacgctggttcgttttatatttcgtccagatattggccccggtgaagcgcggggagagggagctggtggtgatgaaatattcatcatcgacatcattgtcgataaacatataggtgttgctgccgctcccgtcgttggtagcggtgagcgccatagccggcgcggccagcagccagccggccagcagcatgatggcctggggtttaatagacattcttaacatctccagtcactgatgccgtttgttgttggatctcacaagggatctcaccgacccatacggcgcctttcgcctctgtcagatccagatccacttcgcagatgccgccgaatttatcgaccagggtgattaccgggaagcgcttatcgacgtccatggcgaactcgccgagttcgtcggtgcgcgttttaccaatgtggttatgaatatcggcgttggcgtagtaaccgccgcgacggtctttcacccggccaaatacggtgaccagctgtttgacttccgggttaagcacgctgacgttgccgggatagagcacgactttgttacgtcggccggtcacgatatcgacgctgtcttccgaatttttgtcgttcatcagctccactttatattccgcgtaaggcggaagactgatgaagttgcttttgccggtcagcgggtagttctggccgttgatctgcgccatcatcctgcccttgccgctgaaatgggtattcaccaccaggcccgcggtttgggtgccttttccggcatagatatttttttccgtccaggccacgctgccctgcgagctcaggctgtagtttgaactgtgctgcgatgagcggctgacggagacggtgccagcgttatatttggtgtcatagctgacgtaaccattggcggcgtaatcgtcggtgcgatagcggctatcgtcatttttgttctgtttaatctgttttgaaaccgatgctcccacctgagtaatggcgctgttgtcaaagctcttgcgcagcgtggcgttcgccagcatgttaccgttctggctggacacgccggtgctaagccaggcggagaaggggatagaaacgtcaatattgacgtacttatcgcgcagattttcgtgggtgttgtactgataattctgaataccggcgcgcagagaaatcgtcgcgtagcgattggctagcagcgattgatcgtaatcgacgttggtataggtgctcccggtatatttgttattggttcggctgacgctcagcgtaccgaggaacggcgcgattttgcgcaggttcgcgttggcgccgacggtcacatagtcgttttgctgcatcggtagcgcgttaccgatggaactgtactggcgcgatccccacaggttgccgtacccgtccggtaaactcatattgaaggtggaggtactctgccagctgccgtcggtagcgagcagcccctgctggttaaagctgaacgcgttgttgaaaataacgttcgcttccgtttcattgacgccgttattgtcaaaaccgtagagcgtggttttcagattcacgccggaaagccagggttggctggttgcagcggcgaccccggctatccacgtattccgtgtaccataattgatgttgtagttgtgacgatagtccatcttgttgtattcgaggctgcccgcgaaggtttgccacgagagatcgccggtgacgctcgatttccgggcgaacgttttattgatgttcgccgtccggctgctgaccacgcgcccgttaacgaccacctgtatatcaacgttgtagatgccaaacggcaggcgcgacgtatccagttcgtagctgcccatggagaagttttgaatgctgagcagtttaccgtcacggtaaacgtgcacttcaccggcggctggcaggaacaccgttacgggcaccagagcaagcgtattgtcttgcgtttgggaactgcttttattgccatagctgatgccgtaaatgcggctggagttcagggcgctcatgctggcgatcgattgcagattccaggtatccaccattcccatggcgaagcggcgtccctgatagtcacgttcgtacatcgagcgatacagtttaccctgctggttgccggtaccaattccgtagagggaaccgttaaagttcagatggtgctcgcgcagcgaccaggtattgtccagcgtcaggtagctgctggcgttatcggtattctcatatttgttgtaatagctccccatcgagtaattcagcacgctcgagagattctgagcagtggattccccaagcatgttggtacgcggcaaaatagcggcctgcatggctgcccggttaaccgtcagctcaagataaaaggaacgcgtatcgagtgaaagtgaggcgtctttgttgatataaacgcgctgaccgtcgccgatgcttttgtcctgcatctcgttgagcaacgattttatctgcggtgataattcggttcgctcagggagatcgctcagcgcgatctggttcaggcgaaactcattatccttgattgtgaggacagcatcggcgattttttgctggctgcgttgggtactattatcgccttcataacgaataaaaacagggaccgtcatgccctgatataacgcgttagcaaataccgaaggaataacatagttactgactttcactggcgctgtagcattagctgcccaaccctggtttaccgtgatcaataacccagcgaacaacgtccctttgacataaccaagattatccataatgttactcagtttacatttatatattgctcaccgtgccatattccaattcgcgtttgtttgttggtgagatcggtatgctttatttttacgctgacaccaggcatgacataatagcgttcacggcagccttgaccctcatccttcgctttatcacgacagggcccgtaggagataacgcggaatgaagcgttgccggtattggtgaccgtgtcattatcgcgacgatagtcaaatctttcttcacgcggcgcgaccaccagaatggtaccaataatggcagaggtcgttgcctcaccctgttttttcttcttgctggcttcgaattcggtcaccggctcatcggtccaggatatgcggtaataacgttcctggttgtcctgaggtcctttgtaaaaaaaacgaaagttctctttggcatttccgggtaatatcagactggctggcgttgataataattccgatctgctcgccatcgggataaccttgccgccggccataggcgatgagatacgctccacgctgacgctaacgtaacgcgccgtatcggtggtattaatgatttcttttgccagagtcgaggcatccggccccattattgaggtgacgtctccgacattaatcgcataggaggagggcgtcacggtgaataagaagagagagagtaataatggattcagtttcatggcgcatccttataaggaggccgaagcctccttgtcataccggacaggtgttggctacacctgattagatagtccagaccgcgttgaactgaacgcgaacgtcgccgctccagtaaccgtcggttaaatctttgaactcagcggcggtgctgccgtcagaagtcgcagagtcgacagtgaaatcgaagttaccctgagtgctgacgcgatcggcgcctgcgaaggcggtagcgacagccagcgcatccagacccgcggagatgttgttggcggtatcaatcatcgttaccggcgtggttttgttcagcgcgttgccgttccagctcacaccaacggccagagtagaggcatcagtggtacggctcagggtgttgctgacgatctgagaggtcagcgtgaagtcggtcgcgccagactggccctggatggtgatgtcaaaagcgcctttctgggcgttaaacgctttaatcccttcagcgtactggaagttcagggatttcagcggagtgacgaccagcgcgctggtggtgtctttagttgcgcttgcatcccagcttgccgtggcggaagtggtcacgtcagccattgcgttggaagagataagagccgcagccacaacacccgctaatacgatttttttcattttaaatttcctgagaataattaagttagttccatttatggagttattgctacaaatactgataatgactttatccagatagaataatgtttaacttccctctgcctcccatcttattctgcaagctgagcttgattgcgtagattcttttttcggccatctgcaattcgttggctatttgcttaatcgacttttctgcgagtaaaagatcgagaaccaacacttcctggtcgctgagtttttggcggtaacctcgaccatctctttgaccgagaaacgaaagctgtattttctttccaatctcatgccgggtatcgctggcgttgataatcgaaattatctgctgacagcggtgtttccagtacagcgcgagcggttgtgctaatctgtcggcaatcaacactacccgcaatcctgttttgatcagatattcaagccatttattattggtgaataatctgatgttgtagcgagaaaaatcaacaaaaataaagccagaattagagaagttgtagtgcttgttaattaaaaaacaatgcacaccattttttaaatagatgtttttatcgggccatacgcaatagcgggtttcaatgcagttaatcgattttatcgttggtcggggatagatttcgcattgatactgacagcttatgcagtataccttctcatatttctgtggagccatatgtcgatttatttccctatattgtcttaccctatcgttcagtgatgtggctatattatggctagttaataaatgtgacaactttaatttctggatggttatatagatgaaaaatgtgtaaattcttaatgccaaaaactgtctggatttatactaacctactctaatgaataagaaaaatctgaagatgcagagttttatgtcgattcctctttaagaattatccatggtgaccaggaattttctcgctgaatgggagaagattggttaaaaaaaaacagcacaataagtcaaaaaaaacgctatcccatcactttttgttagttttgtgtttttattttgttttattttatgaggtttattatgtaaacacctgctttttgtaagggaaagttgcgatattttggattaatggggaaaggatagtctggtgaaatatgatctggcgtacaaaacagggcgtttttatgcactaaaacgcgtcggcgtttgaaggggagtgaatcagaaggatgcattaaatcttaaacagaagaagaggacaaaggattttcggagagacatggcgcttcagcctgaactggctctgcctgcaagccgccgtagcgcacccgggacgatggcagcgtggattttgacttgcagacaaatgagcgaatactttcgatgcgccccggacgcttacgcccctttcagcagaggaagcaggtggttctcggtaaggggagcaagcttaatatgccgatcctggcccggcgtataccagataacttcttctatttctgccgtcggtgtaaagctcgctctgttggtggctatctgaaagatatccgcagagaccgtatggcccggctcgtttgccgccgtatcggtgaagtggcctaacgggaccagttcttcaggtgagacgatgaagttgagctcctcttcgagctcgcggatcagcgctgcttccggggcttccccgatttcaggctttccaccgggctgcataaagtactcagtccctcgtttgcgcactaaaagacagcgtccttggccgtcggcgatcactgccgccgcgatatgaatattttttattgtgttcaagagataccccagttatatgccgatgatgttcaacggccagcgtacgtttcatctctcgcgaaacaacgccggcgctatcatgatagcgaccttagcgtgctaatcaatcccgtcgattatcgcaaaacctgctgacggcgcaggcggggctcatttatgatagcctgcgaaatataacgtctatgcgggaagtgcagcctctatgtcaattcagaaaatcgctcgcctggcgggcgtctcggtggcgacggtatcgcgggtattgaataacagcgataccgttaaagcgaagaatcgcgaacgtgtgctgcaggcgatcaaagagagtaactaccagccgaatctgctggcccgccagctgcgaacggcccgcagcaatatgattctggtgatggtctctaatatcgccaaccccttttgcgccgaagtggtcaagggcattgaagaagaggcggaaaagaacggctaccggatcctgctgtgtaattcaggttcggatttagcccgttcaacctctgggctgcagctgctctccggcaaaatggtcgacggcatcatcaccatgaacgcgctctccagcctgccggaactcaccaccatgatcggcgacgcgccctgggttcagtgcgcggaatatgccgataacggcagcatctcctgcgtcggcatcaacgacgtcgacgcggcgcagggcgccgtttcccggctggttgacggcgggcgtaaacgcattgctttaatcaaccacgatctcagctatcgctactcgcgcctgcgcgagcgcggctataaaagcgttttgcacgttcgcgaactggcgtatcaacaggtgatctacgccagcgatctgagcgccgcggccggtaaacaggcgatggagacgctgctggcgcaggaagagcagccggacgcggtgtttgccgtctctgattcgctggcggcgggcgcgctgcgggctatcgctcaggccggaatgcgggtgccggaagatattgcggtggtcggttttgatggcaccgaactggctgaagtggtatcgccgcagctgaccaccgtggaacagccttcgcgcgagattggccgtacggcggtcacgctgctgatgaaaagaatcgacaatcccgacgccgcggtcgagcgggtgatgatggactggcgcgtcatttcccgcgccagtgcctgaggatattactgagacaccgcgcccgccagcgaacgaatgtcgttaccggtaggggactgatggatccgcaggccgaattcgtcaaccacggcatagacgtgatcgaatatatccgcctgaatgctttcatattccgcccacaccacggtgttggtgaagcagtaaatctcaatcggcaggccgctggcgtccggcgccagctggcgcaccatcagcgtcatatctttacggatgcgcggatgattacgcaaatactcctgcaaataggcgcggaaggtgccgatattggtcatcctgcgctgattcaatatcgattgatcggcggcgttctgctggttccacaggctgatttcctgatgacgtgaatccatatacggcttcagcagtctggcctgaattaagcgctgctgctcctgttcatcaagaaaatgaatgctggtggtatcgatattcaggctgcgcttaatgcggcgaccaccggatgccgacataccgctccagtttttaaacgagtcggaaaccagcgaccaggttggaatggtggtgatggtgttatcccagttgcgcaccttcaccgtggtcaggccgatgtcaatcaccgcgccgtcggcgccatattttggcatctccagccagtcgccgagcttgagcatatcgttggcggagagctgaattcccgccaccaggccaagaataggatctttgaataccagcatcagtaccgcggccatcgcgccgagtccgctaatcagaatcgccggcgactggccaatcagtaaggagataaccagaatgccgacaataatcgcgcagaccagcttaataccctgaaatatccctttaagcggcagctgagaagcggtggcgaatttctgcgataaattgaacaccacatccagcagcgaaaagaaggacagcatcgcgtagatcatcacccacagctgcgcgcaggtggtgagtatttccgcggcctcgctgcctttttgcagccacaacaccgcctgcacgttgacgataatcccctgcagggtgaaggccagacgatgaaacagtttgttctgggtaataatttgcagccacaggtggctgctggcctgcgcccgcttttcgaaggtgcgcagcaccactttgtgcagaataagatgaacgacaatcgccgtcagaaaaataatgccgaagataataatgagtgaggtggtgggggtaattttgatgcctaatgcggcgatttgcgatatgaattcctgcataacgtctcctttacatccagcggttatgatgaccgctggatgtctattatgcaaatcgcaggttacgctgttgtgaattatggggtcgctaccgccggacggacgttaaggtgatggcgtagccacagcgcgatggcgcccaggaccagcatcatcaccacttccaccgccaggaaatcgatcagcgcccggggatagtcgccgccgctgcgctgggcaagggttaagaatagcgacccgagaattgccgggcccaggcccagcgtcgcctgctgcagagtgctgagaatcgcgctcccggccccggcgtcgcaggcgctgatatcgcgcatcccgatacggtaaaagctgttgacgatcagcgcctgcccgtagccgatgagcgccgtggaggggaccagcgccagggtggtggtgtggataccaaggcgataaaaggtcgcgctcagcagcagcaggccgacaatctgcaccgacaggccggtcagcaaaatgcgccccatgctgtagcgggcaatcagcttcggcgcgtacagcgcggagatgaagtaggccacgccgagcgcgataaagctgttgccggactgccacggcgccatccccagaccggcctgcatggtcagcgccatgcagaacataaacccggaccaggcgctgaaaaagagcagggcgatggccatgccaaagcgaatgctggtgagcttcagcaggcgaggcggcaatagcggctgctcgccgcgctgctgtttgctcagcgcgctggcccgcatccagaccagcagcggcagcaccgcagctaacatcagctgcagcgtccacggccagtgcagctccggccccagcgccatcggaaacagcaggcagcagaggattagcgcaagactgaaggtgccctgccagtcgatgcgcgaatgcgcttcgcgccgggtctccgggacgtatcgcgggctgaaggccagcaccagcaggcagatcggcacgttaataaagaaggcatttcgccagcctaaaccggcgatatccgccgagaccagccagccgccgcccatctgaccgacgataaaggcgattccgccaatgccgccgtagaggctgatggcccgggcgtgggcggtgcctttgagggtgatatgcagcgtagcgagaatctgcggcacgatcagggccgcgccggcgccctggaccgcgcgcgccgccagcagcgtgctgatggagttcgccatcccgcacagcagggaggcgacgccaaaaatcgccacgccccacataaacagacggcggcggccatagttatcgccaagcttgctgcccatcgccaggcaaacggcaaaggcgacgccgtacagcgcgacgatcagttccagctgggtggcgctggcgttcagcgactgggtgatggagtccagcgcgacgttggcgatcgaggtgtcgatcagcggcagcatctggccggtcaacagaaggaataaaccggcgcggccgggtgaaacagcagacgaattcatcggatctctccattgcgtcattcagcggatggccgtagcatcaccgataaattaaacgggtaccagttcctgcttatactggtattggcactaccatgctggaggttttatgacgaccatgccgcaacgtgaatcgacgatcgccgcgcccgatgatgcccgtaaacagctgggggcgtttctgcgcgcccggcgtgagagcctcgatccgcagcgcctggggttgccgcgcgttggccgacgacgcacgccgggcctgcggcgggaagaggtggcgatgctggcggaggtcggcgtcacctggtacacctggctggagcaggggcgggaagtgaatccgtccgaggccgtgctggtgtcggtggcgaacgcgctgcagtgcagcccgctggagacccggcacctgtttgtcctggccggactgacgccgccggaagccgcgcaggtcacggtatgcgaaggcatcagccccggcacccggcggatgctcgatagcctgatgccgcagcccgccagtattcagaagccgagcttcgatattgtggcgtggaacgacagcttctgccgcctgatgggcatcgatttcgccaccattccggaagaggatcgcaactgcatttatctgtatctgaccaatgaaacctggcgcagccgtattgaaaatcgcgacgtgctggcgacgtttgtctcctatttccgcgcggcgatggcggagcaccgcggcgatccgctgtgggagaataagctggcgcgctttttcgccgcgtcggcggagttcgaggcgctctggcatcagcgctatgaggtacgcggggtggaaaatcaggtgaaacactttaaccatccgcagctcggacgcttcagcctgcagcagatgtactggtactcggccccgcgcaacggctcgcgcctgctggtctatttgccgatggatgaaacgggcgagcgggcgctggcgtggttggataaataaaaccatatattgctggagagtcagagcgggactctccagccacgttttgccagaggggtaaatcctccgcgggtaaggttcgccgggagcggatttgaacgccgggtaacggcggcctatcagggcgaggcccatggatgggccgagtaatccgaagacaacgcacaggcaacctgaagtatggcggggatagatatttctctgtttattgccaataacccggctgtttgcttattctggcgatagcgtggccagggtgaagacgataattaaataatcatttacgccaggaatctattaattgtggcggcgggaggttgagtcatcctgggaaaactatccaaagattaaataagtgtttttgttattatcattatccatgatgatagttccggcgggttatgtgacacagtacaaataattacaattattgagcttgttgagaatatatttcacatgcgttgaatgcatggtttcctctattgtgataggttgcttgttaaataataaattcatataaatctatatattttcagaacatctaaatataacggggagttgaatgaaacgaattgaccgggtttaccattggctgctggaacacgcagacaaaatgagctggcatgatatgtgtttgcagagagggttcaatacccacgatattgctgatgggctgcgtattttgcgaaacaatgtcagtttcgaactgggtaatttgttacgtatgcagcagatcgttaaagtgaaaggaagaccgatagcctacattcctaaagtcagcgttgaacgtgcgttgggtatctctctgtcagaggtggagtttgacagttttgatgcgctgaatgcgctggtttctcctggcggggaagtcgcggcgcaggcgccagccgattcgcgggtttctgagcaccggagcgccgatccttttagtttgctgattggcttcgatggcagcttaaaaacgcaggtcgaacaggcaaaagccgctatcctgtatccaccgtccagcctgcatacattaattaccgggccgacaggcgttgggaaaagcctgtttgcttcagttatgttcaactatgcgtgttttgttggccgttttgatgcgaaaaaacccttcattgtgtttaactgcgcagactatgcaatgaacccgcagctgctgatggcgcatatttttggtcatatcaaaggggcgtttaccggcgctggcgaggacaaagagggattggttgataaagctaacggcggaatgttatttctggatgagatacaccgattaccgccggaagggcaggagatggtcttctactttatggataccggtacctacagccggctgggggaaacggaaagaagacgtacagcgagcgttttattggtgggagccactaccgagaatttagaatctgcaatgctcaagaccttcattcgccgtattccaatcatcattcatctgccaacattcgaacggcgcagcacccaggagaaaatatcgctattgaaattcttattgaatagagaagcacagcgtattcagaaaccgatcagaattgatgtagaagcaatgaaggcgctgataggtaacacttcttttggcaacattgggcaaatgaaatccaatgtgcagctggtatgtgcgaatggctttttacactgtttgcatcaagatattattgatatccgcttccgcgatctgcccagcgaaattaaaaatggcctgtttcatctcggcgcacggcgcgatgaaatgcagcagatcaatgattaccttgaggattttttagttattcagccgggaggcgagccgtcgccgctgcaggaagacgatcaatatgaacccactttcaacctgtataatattattgaagataaagtcacttttatgcaggatcatggcctgtcccatgaggaaattacgcgctttattttactggacatcagcattcatctgaatactttttatatgaagtttcagaacaatgccgggatgcaggaaaatatattaaaagtagtcaatgaggatatcctgcatttctcacagcagatgaaaaaaatcgtggaacgggaattgaatcatcatctgacggagcgctttttattggcatttagtttacatctaacatcttttttagcgcgaacggaaaatcgccataccgctctgcttccccgtattgagcatctactgatgaaccaggggcaggagtatcaggccgctaaaatagtcaagcagcacattgaagacaaatttggcattgatgtgcctgtcgtcgaagagatgtatttaacgttgctgattggttctttgttgaaaacccagcaggaagagcgtgttgcggtacttgtcgtaatgcacgggagccataccgccagttcgatggctagcgttgcccaaaagttactgggtgagggcaatattgacagcattgatatgcctttggacatcagtcccaaactggtgctcgatcaaatgcgccagcgtattaaagagctgaattgcaacaaaggcgtgctgctgctggtggatatgggatcgttgaacggttttggcgacattatcatgcaggaaacgggaatacagatacgcacattaaccatggcttcgacgcccacggtcattgaggcagtaagaaaatcggcggtcatgggaatggagctggatgatatctacttttcgctgtgcgatttcaagggatatggcagttatcgtaaaacgacgcagcagctggatacatccatgctttatcagaaagtgaaggcgatcctctgcgtgtgctcaaccgggcagggaacggcggagaagctgaaaacctttgtcgacggtatgctgtgtaatatggaacgttgcgatattaacgttatcgcgatgccgctgaatgaagtcgaaatacaaagagaccttttactcaaacgttacgagttcattatgtctctggggatagcagatcccagaatcaatgcccctttcttacctctggaaacgttgttttccagcaacggtgaggcgcagtttacgcttctcgttcaacggagccatttacagtcggttattcggccgcatgcgatggtgcgcaaaattagcgaggagagtatgaccgagtttctgacttaccttaacccgaaaaaagtggtcgatccggtgctggagtatatcagtgagctggagaagctggagggattccccttcgataatggcatgaaggtcagcatcagcgtgcatatcgggagcgcgctggagcgaatggtacaacactgtggcctgaagtatgatggtagccttagcgaagacaaccagaaaaaactggatacctaccagacgattgctcgttgcttccagaaaaagctggcgattaccctggatcgcgacgagcttagctacatcctggagatggtcgcggaactctccgagcgttcggctgcacaacaggaagatttatcgtagtcgtttaatggcctctttcagaatgcgcaggttctccggcgccgggcggtttgttctgtccggtgaagcgtgacgtttttcgcctactggccgttaaatgctgtgggtagatcgtcgatgaaaggcttcagtagacgattaaagctactacacttggttgattctggcgtgctgtcgcgctgcagatgttgataaatttgctcactccgctgcgatacggctttatcttcagcgatatcccaaccccgctgcctggctaccttatcaatagcgttggtcatgaccgcgtcgctgggtaaatcactgcggtgacattgatatttcagatattttgcgctggcgctcacggaggccagttgttctatttgctcgtcaggaggaataggcttttgttgtaatgaagaacgggattgttgacaacctgtgctgactagcagaaatgcaatcagcataaaatggcaaaaacgagatgaccgcatggcaataatcttactcttatctaaaaaacagcattctagcaagttacccccggttgtcacgaattagcgcggccggcttactttattgcgatcttgttctcatatttgcttttataatttctgatttatcccccagtgaatccatcacgccttcggctaacacttcttaatattcacgctataataatagtgtgatacacatggatttgtatccttaattccctgttctagtgtattgatattttaatacacaaaaatatagcccctttcacaaaccccgagttcatcgacttctcagccctgttaacgtcattaatacactaacctggcacattctttgctggtacagactcgtatattattttcgctcaataagattatggtttcatttactaaaagcagacgtgatggtttaaacaggaatttgaatcaatgaatacagcaatcatagttgctactcatggcgcagccgcaggacctttgattaataccactcagatgatcgtcgggcagcaggaaaatatcgccacgattgattttctacctggggaaaacgttgatacgttggtcactaagtttgaaaacgttctccagacgctggatcaacgagatggcgttatctttctggttgatatttacgccggtagccctttcaatgcggccagcttgctatcgatgaaaaaagataactgggatgtaataaccggggtcaatgttccgatgctgatcaacgtgtttttagagcgagagagcgtgggggaatacctgcaattagtcgatatctcaaaacaaacggcaagagatggcattaagtctctcaaatacagtttaaataacaataatacagaagaggatcatctttgaaatgaatgttttattatcacgtatcgacgatcgttttattcatggccaggtggttacccgttgggtaaaagcgtatccagccgatcgtttaattgtcgtctctgatgccgtggcggcggatgaattgcgcaagtctctgctcatctccgttgctccttcaggcatgattgctagcgtggtgtccgtggaaaaaatgattaacgcctggcatagccctcgctacgcaggggtcagcgcatttctgctatttgaaaaaccgggggatgttctgcgattaatcgagggcggcgtcgcgattaaaagcgtgaatgttggcggaatgcgctttgagaacgatcgcgagcaaatcaccaaatccgtcagcgtaacctcagacgatgttgcggcatttcatgctctgcatgcgttgggcgtaggtctggaattacgccaactgccgtccgatgccgccgtcgactttatctccaaattaaaataatcgagggaatcatgaccactatacaaattatattgctgctggtgattgcagccattaccgggatgggtagcgtgctggatgaagggcaaacgcatcgtccacttgttgcctgtacgctggttggctgggtacttggcgatatgactaccggtatcattcttggcggtacgctggaaatgatggccctcgggtggatgaacgttgggctggcgatggcgccggataccgccatcgcctcggtgatatcgaccattctggtgattaatacaaatcaggggattggcgaaggcatcgcgattgccgtcgcgttagccgctgcgggtcaggcgctgacgatttttgtcagaacgatgacggtgttcttgatccaccgggcggatacctatgctgaaaagggcaatatgcgcggtatcgaaatcatgcatatcactgcgcttggtttccaggcgctgcgcgtgatgattcctacctttgtggtggtcatgatgagcgttgattcggtgcaggccatgttgaacggtattccgccagtggtgacgcatggtctgcaaattggcggcggtattattgttgttgtgggttatgccatggtcatcaatatgatgagcgtcaaatatcttatgccgttcttttttgccggtttcttgattgcggcttttaccagtttcaaccttgttggtttagggggaatgggattagtcggtgcgttgctgtatatacagctgagtccaaaataccagcctaaaaccctgaccgccgtggcggatggtgggccggcttctttaaataataacgacgatttggatgcataatgaagaacactatgatgacgagacacgccgccaatctgggtgaaaaaaaattaacccgcggtgatattattaacatgtttatccgttcaaatttcttgctcggttcatttaactttgaacgtgtacaggcgatgggctactgcttcatcatgatccccgccattaaacgcctgtatgggccgggcgcggaacgtaatgaagccttgaagcgtcaccttgaatggtttaacacgcagcctttctgtactgcgccgattctgggggtgacaggggcgatggaggaagagaaggccaacggcgcggatattgatggtagcagcatcagcggcgtaaaagtgggcctgatggggccgtttgctggcgtcggagatccgatcttttgggggacaattcgtccggttctcgcggcgctgggggcttccctggccctgggcggaaatgtgcttggcccgttgttcttctttttcgcttttaacgctattcgtctggcggtgaaatatttcggtttgaaatacggttatgaaaaagggcgtgagatattaaccgatctcggcggtaatcgaatccagaaactgaccgagtcagcgtcaatcctgggcctgtttattatgggagcgctggtttgtcgatggacaacgatcaatgtgccgattgtcgtctcccgcattaccggcgcggatgggcaggtcgtcgtgacaacggttcaggggatattggatcagctattgccgggtatgttaccgctgctgttgaccctgttcgtggcaaagctactccgtaagaaggtgaacccgctgctgatgattatcgtcatatttatcatcggcatttttggctactgggccgggttcctggcataaataataatgaggagatagtacaaattattaaaatattacatgttatggataacacattatatctcctcattaaacttgttctttacatatccagcatcggaacagaacggaagaatatataaggacagtatatgaaatatcatttttttcagaaaaatagactcagccttattactctggcaagtttagcgttactggcggggtgtgataattcggatgattatagcgagaatcatccctcacatcagcagtcatcgtatcttgagaaatatcgccctcagctacagtttactgcggctaaaaactggcaaaacgaccctaacggcatggtttattttgacggcgaatatcatcttttttatcaatataatccgaatggcaatagctggggagatctctcgtggggacatgccgtcagtcgggatctggtccattgggaggagcttcccgttgcgctgccggtggaaaaagatgccgatggtaacgtcacgcagatgtatttttccggcagcgcggtagttgatttcaataatagtagcggttttggtaaagcggatcggccggcaatggtggctatgtacaccagctattatccaaccgacatgacgctggataatggaaagactatcgcggcaggaacccaggcgcagtctattgcttatagcctggataaagggcgaacctggacgcagtatgaagataatccggtcatccctttaccgccagcgggctatgagagtcagtttaaggaatttcgcgatcctaaaatattctggtatgcgccggaaaacaaatggatcatggtggcggtcattgcgactcagcataaagcggtattttattcatcgaccgatttgcgtgattggaactttatgagcgaatttggtccggcgaatgccgttggtggcgtctgggaatgtcctgatttatttgaactgcctgttgacggtgacagtaataataaaaaatgggtaatggttataaatattaatcccggcgggcctgctggcggatcgggtaatcagtattttattggtcactttgatggtgaacgtttcacgcctgatgatgatagcgtgttcaacggcgaggcgcccgtcggttcactcattgccgatttcgaggaaagcgagagcgaatccggctggacggcgacaaaagatctgcagggggcttatctgtctaaaggcgaccgcgccgggcagtctggcgttagccagtatctgggagagcagctcgtcaataccttcgttaatggtgatgccagcgtcggcagcgtaacgtccccggcgtttaaaattaccgatcgctacatcaatctgctggtcggcggcggcaatcatccgcgtaacccggatgcggtcgaagacagcgttccgccttccggcgatctgctgtttgccggtgccgattttgagggggaagatggcgcaacttatgatgatattggttggacctcaagcggcgattttgttggccaggtcgttgccagcggcacgatagcgacgcagcagcaggtctccggttttatgggcaggaaactggtcaacagctattttggtgaattagtgggtaaagggggagatgcagtgacggggaccctgacttcagcgaacttcaccatcaataaaccctatatcaacttcctcgttggcggcggtaatcatccttatggcgcggaaggcgcggcggccgtcgtgctgttggtcgatgataaagtcgtcaggtcagcgaccggtagcgacagtgagtcgctgaactggacgcactgggatgtacaagagtatcagggtaagcccgcccggataatgatcgttgatgaaaataccggtggatatggccatattctggctgaccagtttatggccggggatgagccggcgcagccagtatcaacggagaccacggttaacctgctggtggatggcaaggtcgtttatagcgtaaccggggataattcggaaacgctgggctggcgttcctggaacgtggccgcactgaagggagagatggcgcaaatccgcattgtggacaatagcaccgccggttttggtcatgtgctggtcgatcacatcatacagtccgatcggcccaggcagattgcgaactggggggacttcgggtcggatttttacgcggcagtgacctggaatggcgcacctgatggtaaacgctattggcttggctggatgagcaactggaactacgcgggcagcattcctaccaccccgtggcggggcgggcagactctggttagagagttaagtttgcagacgattgataataagattcgcctggtacaaacgccggtggatgcgctgaaatcgctgcgtaataacgccttgtttaccctgtccgaggagaaggtggttgcccctggcgacacgctattagcggatagccaggttcagggccaggtgtatgaaatcgaggcggagctgcagccaggcagcgcgagcgaagcgggctttaaggttcgcacggggagccacggcgaggagacgctggtcggctatgatgccgcggccggcgaagtgtttatcgatcgtacaaaatcgggaacgaatgcgtttaattctggatttgcggcccgccatagcgctccgctgccgttgtcggataacgcctcggtagcgctgcgtattattgtcgatacttcatctgttaccgtcttctcagggaaaggcgaagtcgtgctgacggatcagattttcccggagccgaccagtcaaggcattgagatatacagtaaaggtggagatataaacgtaaaatcgttgactatctggcctctgaaatcaatctgggcagataaataaaatattaagcgagtatcgcgtaatactttaccgttggttcgtttttttaatcacgcaagcgcggtctggataatcgtaaaatattcaaccgtgcttgtgtgaaaccaattggtttattgtctgcgtatgccgcggttcatattgcggaagttatattaataaatattgtcctgatgagataacagagcaaggattagcattgtgatgtccaaaggcataaatgtcgcgttccataaaagttcttctgtaaataaacagaaagctgggtagggggggcgagatgcaattatctggcaggttgctggcatgcagagaagcggcttcgcggtttttgactccgcgttggatgatatggggattatcgctcttgatattaaatcagctcgctctgctgagctggcggagctggctggctgacgatatataccatgtggacctggcgaaagcgaaagccaattccgctccagcaaaaccagaccgcggaattgcggcggaaaacgatcgttttaccctctttgggacttcgtcgtccgcttcctccgcctcaggcccatcggtatccgacaatatcattcgtcatgcgccgccgtcgtcgctcaaactccgtttggccggggttgtggtgagctccgacccccaaaattcgatggcgattattgccaaagatagcaagcaattgacgctttttgtcggtgacagcctgccgggttattctgccaaaattatgtctattttttctgatcgcattgtgatttcttaccaggggcgctatgaatcgttattgtttaatgaacaatcggatgccggaagaagcatcaataaatcatcagtagcgcaaatcaagacccggttgcaaaaacacccgcaaaatattcttgattatatcaaggtgacacccgtcatggtggagaacaaacttgcaggctatcgccttaatgcaggtaagaatagggatttattttatcaatcaggtttgcaggacaacgatcttgctattgtgcttaatggtatggatttacgcgacactcaacaggctcagcaggcactgaaacagcttgctgaactcagtgagttgaatcttaccgttgagcgggacggtaagcgacagaatatttattttgtgcctggagatgattaattgttgaatataaaaataatcaaaagactctgtatcgttgtcttggtgtttttttcgctggtcattcggcagggcgcgggcgctgagttttctgccagctttaagggggtggatattcaggagtttattaataccgtcagcaagaacctgaataaaacgattattatcgatccggctgtacacggcacgattacggtgcgcagttacgataggctcaacgatgaacaatattaccagtttttcctgagcgtgctggatgtatacggctttgccgtggtggacatgaagaacggcgtgctgaaggtggtccgcgccaaagatgcaaaaaccgcggcggtacctctcgccagcgatgctcaaccgggaaagggagatgaagtcgtggcgcgcgttgtgcccgtcaataatgtgcctgcccgtgatttggtcccgttacttcgtcaattgaatgataacgccggggtgggcagcgttgtgcattatgagccttccaacgtcctgttgatgacgggacgggcgggagtgattaagcatttgatggaaatagttgagcgcgttgataaagcgggcgatcgcagcgtcgtcacgttaccgctggcctacgcgtccgctgccgacgttgtcaaaatggtgaccgaattaacccgggatgccggtaaatcagcgtcatcgggcttaatgatagcgaatgttgttgcggatgaacgtacgaattcggtattgattagcggcgaaccgaattctcgtcaattaattatcgcgatagttaagcagctggatcgcgaacaatttgttcagggcaacaccagggttatttatctgaagtatgccaaagcgaccgatttggtcgaggtcttaacggggatcggcgacactattcagggcgagcaaaagagtgctaaaccggccatcgcattacgcaaagacattactatcaaagcgcatgagcaaaccaactcgctgatcctgacggcggccccggacgttatgcgggatttggagggggtgatagctcagttggatattcgtcgcgcccaggtcctggtcgaagcgattattgccgaagtacaggatgctgatggtctcaatctgggcattcagtgggccaataaaaatagcggcatgtcgcaatttaccaatacgggcctacctattacgaccgcaattgccggagccaatcaatataaaaaagagggcgcggtggatagctcgattgccagtacgctcaacggtcttaatggtattgcggcggggttttatcaagggaattgggcgatgttattgagcgcgctttccagtaatagcaagaatgatattttggcgacgccgagcatcgtgacgctggataatatggaggccatgttcaatgttggccaggaggtaccggtgctctccggctcgcaaacaacctctggcgataacgtcttcaataccgtggagcgcaaaacggtcggaattaagttgaaggtaaagccacagattaacgaaggggattctgttttactggaaatcgaacaggaggtttccagcgtggctgacgccgcctccagcagtagcgctgacctgggggcgaccttcaatactcgcacggttaataatgcggtgctggtgggaagtggcgaaacggtcgtcgtcggagggctgctggataaaagcgtgacggatagcgtggataaagtcccggtgctgggagatattccggttctgggttacctgtttcgctctaacagtaaaaaagtctccagacgtaatctgatgctctttattcgcccatcaattatccgcgatcgcgatcagtatcgtcatgcatccgctgataaatatcatgcttttaatcaggaacaagttcagcagcgtggtcatcaggataacccagcgacgttaaacaatgacgtattaaagctgcctccggatcaaaatggcgccaccttcctgaaggttcgcgcggcgattagcgcattttattcgcaggaggggtaatgaatatgtctgttgccgacgtgaataaaccgcatccgcagcttccctttgcctatgcgcatgctcaacgcattttactgcagtgggagaatactgaatgccgggtgctgcgcgtcgtggaaacgacagccgcagcgttgcttgaaacccgtagggttgccgggtgtgccctgaatattcgtacgctatcgaatgcggaatttgagaaacaactgattagtagttaccagcgagactcaaccgaaacgcggcgactgatggttgatatcggcaacgaagtggatttttataccctggcggaagagttacctgacagcgatgatttgctggatgccgatgatgatgctccgataatccgtctgattaatgccatgctgaccgaggcgattaaggataaagcgtcagatattcacatcgaaacctatgaacgtcatttgcaaattcgctttcgggtagatggcgtactgcgtgaaatattacgccctcagcgccgtctggcttctttattgatctctcgtattaaggttatggcgcggttggatatcgcggaaaagcgtattcctcaggatgggcgcatggcgttacgcattggcggccgggcgattgatgtgcgagtgtcgactttaccttctcattacggtgaacgaattgttctgcgtttgctggataaaagcagcgtgaatttggatctgtcgacgttaggcatgtcgttatcacaccagcagcagatcgatgaactgattcagcggccgcacggtattctcctcgtcaccggtccgacaggttcagggaagagcacgacgctttatgcggcgttgagtcgtctcaatgcgagtgaacgcaatattatgacgattgaagatcctattgagtatgagctcgaggggattggccagacgcaggtaaacgccaaagtggagatgacttttgcgcgcggtttacgcgccattctgcgtcaggaccctgatgtcgtactggttggggagatccgcgatagtgaaaccgcgcagattgcggttcaggcatccttgaccgggcatttggttctttcaacgctccataccaacagtgcgttgggggcattatcacgtctgcaagatatggggattgaaccttttttactgtctacgtcgttattggccgtattggcgcagaggctggtgcggactctttgccccgattgccgccagccctacttagtcgctcccgcgttggcccatcagatggggattgcgcccggagctcgcttatggcagccgaagggatgtccgcaatgcggctttactggctatcgtgggcgtaccgggatacatgaattactgctgattgacgataggatccgtaccgcaatccataagggccacggcgagttcgcgattgcccgcttactgcagcatgaatacaaaacgttacgctatgccgggctggaaaaagccctgtccggcgagacaagctgggaagaggtcatccgggtgactgaaaaccagtcgcaggaaaaggagtgaccgcgtgttattccattatcaggtgttagacgagcggggtaaaaagcggcgggggagcctggaggcagattccgctcgtcatgcgcgtcaacgcttacgagaacaagggctggttccgctggcgctggtcgaagggctgaatgaggcccggcggaataaacgcgggtggcgtatttcctggtcgcgtggaataagcagcgccgatctggcgctgctgactcgccagctggcgacgctggtcgccgccgctttacctctggaagatgcgctggatgcggtggcaaaacaaagtgaaaaaccgcgccagcgtagcctgatggccgccgtgcgtagcaaagttcttgaaggtcattcgctggcggaagcgatggcaggatatcctgccagttttgagcggttgtactgcgcgatggtggcggcgggtgaagcttctggtcacctggaccaggttctgaatcgactcgctgattacaccgaacagcgccagcaaatgcgagcgcgcatcatgcaggccatgatttatccctgcgtacttaccgttgtcgctattagcgtcgttgccacgcttctttctgccgtcgttcccagggtcgttgagcagtttattcatatgaagcaggcgctaccgctatcaacgcgagtgctcatggcgatgagcgacggggttcgcacttttggtcccgggatactgttgctgctgttcgccgggctggtgctgatacgtcgattgctacgtcatgaaggtcgacgtattgccgttcatcatcggctgctgcgcctgcccgttattgggcgcgttgcgcgcggcctgaataccgctcgttatgccagaacgctgagtattctgaacgccagttccgtgccgttgctgcaagcgatgcgtattagcggcgaggtgctcaccaacgaatatgcgcgtcaacagctgtcgttagcgacggaatcggtgcgcgagggggttagcctgcatcgcgcgctggaaatgaccgaactctttccccccatgatgcgccatatgatcgccagcggtgaacgtagtggggaactggacagcatgctggaacatgctgcggataaccaggaccgggaatttacgtctcacatgcaattagcgctggggctgtttgagcctctcttgatcgtcggtatggcggcaatagtgttatttatcgtcatcgccattctgcaaccgatcctgcaattaaataatttaatcagtatgtgaatctgatgggcaaatataaggagataaaaatgcggcggcagagtcagcgtggttttacgctgctggaaatcatggtggtcattgtcattatgggcattctggcaagtttagttgtacctaatctgatgggaaataaagataaagccgatcgtcaaaaagtcgtcagcgatattgtggcgttagagagcgcgctggatatgtataaattggataacagccgatatcccaccacggagcaggggctgcaggcgctaatcactaaaccgtcggtaccacccgaagcgcgttattatccccaggatggctatattcgccgtttgccccaggacccgtggggtggggattatcagctagtcagtccgggtcagcacggacagatagacatattctcctccgggcaagatggcgtgccgggtactgacgatgatatcggtaactggacgctgagtaagaaatagtgcgtcagcgtggttttaccgtgctggaaatgatgcttgttgtgctgctgatggggagtgcggccagtctggtcatcatgtcatttccggccatgcagcaggataccgcggagcggcagttgcaacgctttcaggcgcagctggagtttgccatggatagcggtatgcaaaacgatcggctactggggatccagattcgacccaatggctggcagtttcaggtactgcaaagccaggcggcggaaacgcgctcttcggtggcgcattcggatcgttggcagggctatgtctggcaaatatggcaaccgcgtcaggctgcgttaggcggccaggttccggataaccagccgctcacgctacgtctccctcctccgcaggagtggccgccaaccgcggaaccggcggcggaccccgatattttgctattgcctggcggggagattacgccctttacattaattttcggcgagaaagacgatcgctccgaagtctggctgcgggtagatgaaagcggcgcgatcgcgacatcggcaaaaggaggcgcgccatgaataaacaaaaagggatgacgctgctggaggttctggtggcgctggccattttttccctggccgggctgacactgctgcaaaccaccgcccagcaggccagaaacgctggcatgatgaaagagaaaatgctggcaagttggctggccgataaccaacaggtcagattacatctcaacaaactatggcccgaaaaaagcgcgacgggcgctttggtgacctatgccggagaagagtggtatctcagctggcagggggttgatacagagttcagccagctacgggcgctggatattgaagtgcggcgccataaacaagataccgcggcgatattttctttacgcagctacgtggtgcacgaatgagccgttgccgcgaacgaggttttacgctgctggaaatgctactcgcattagccatttttgcggcgttgagtctcagcgctttccagatattacagggggtgatgcgcaatgatgagatggcacagcgtcaggtgcagcggttaaccgagcttcagcgcgccttcgtttacctggagggcgactttggtcagatcattccgcgccctccgcgaggggatgaacgtctgttctacgctgctcgttatcagcgccaaagtgcggactggagcatctccttcatgcgtaacggttggcaaaacccgatgggaatattaccccgctccgagctgcagcgggtggggtatcgtctgcgccatcagcagctggagcggctgagctatgttcatacggatccgcaggctggggaagagccaatcgtgaaggttttgctgaaagacgtgagcgcttttcgtttgcgcttttttgccaacggtatgtggcgcgatagctggaacgacacaacgcgtttacccgagggaattgaagtgtcgttagtcgtggccgacgtgggtgaagtgagccgcttatttttcgtcacgaccggggagcaagcatgaagcggcggcaaagaggcgtggcgttgctggtggtattgctgattctggcgctcatggtgaccatgtcgacaacgatagccgagcgtaatggccgagcctggcagcggacgatggctcaagtggagcgtctgcgggcgaaatggtatgcccggtcggcggaatcattggccgcaaaaatattacagagagacgcatctggttcaccgaataaaatggatttagcccaaaagtgggcgcaggggcctcgccgttttaccattgatgatggcgaagtctccgggctgatcgttgatggacaggcctgttttaatctcaatgcgattaaccaggggggcgccggcgagggaaggcagtcgacgttaccttactccagacaggtttttagacagttacttatcaacctgggggagggggcattgcgtgcgacgcagataaccgcagccctgagcgactggatagacagcgataatgcgccgggaatcgaggggagtgaagatgcgcgcgacgggccgcaatcggcgccttatctacccgcgcatcaaccgatgcaggatatcagcgagctgcggaccgtttccggcgttgatgccgaactttatcgtcgccttttgccctatgtttgcgtactgcctgtccagacgctgtcgataaatatcaatacgttgagcgagtcgcaaagtcccttattcgcggcgctatttgtgggggaactggatcccgcgggggcgatgaagctgctacagcaacgtccgcacggcggctggaatagcacaacagcatttttggctcaggaggcgcttaaggacagggatacctctgcgatcaagtacgtattgaccgtaaagagcgatctgttttttgccgattttaatgtgcaggtgggggacattcactatagccagcgcagcctgttgagcaagtcgggtcatcgcttccaggtgatacgacgacagcctggattgagcatgctgagggagccttaatgaaaagcaaaaaatcgcgtctacaggcccggttgatactgcatttgcccggtgatgaaaaacagcccgtgcggtggtctttccgttcgccagacggggatgagcaaggcgaactggcggcgggggaaaacgatgagagattaacgcatcttttcgcgacttatccggcacatatcctggtccctgcgagtgagtttgttttccatcaagtgacgcttccgcctaacgccgggcgccagcgtctgcagctgctgtcgttcatgctcgaggagcagctggcaaccgaggttgatgggcttcattttgccattttacaccagcgcggcgaggtatgtgacgttgcggtagtcgacaaacacgatatgcgtcagtggatcagccgttgcgatcggctaggggtacgggtgctgacaatgcttccggatgtgcttgcgctgccgcgggtcgaccacggctggagcgcggtgaacgtcgatgatcggtggttatttcggcgagaggctcacgccgggatggcggtggaatcgtcctggctacccgagtttttggccatctggagtccgaaggtgattgagagctattcccaaccgcctgcgttaagccccccttattgtgaatggcgagcgcatacgccgcagaattttctgcaactggcggccgggggggaaccctatgatggcgccgatcttcgtcagggtgaatttgcccgcgtcgggactttgcgagcgggactacggccctggcggccggtgatgatgttattcatcggctatttactcttgtcgtgcgtgaatgccggtttatctcactatcagctgggacaacaggcagaccattggcggcaggaaagccgtcgggtctaccaggcgctgttcccggcggataaaaatgtgcttaaccctcgtacgcagctgcaaaagcatctacagcagctacggccggccgggcaggatggactggctgtacacatgcatcagttgcaacaactgatggcgaagcatccgcacatcgagttgcgggcgttgtcctatgatgccgggcgtaaaacgctgaaaattgatctctatgccgcatcttttctggtgttagagcagttccagagcggcgcggggcaacattatcgggtgcagccgggcgaggttaaacagaatccgcatggggtcgagagccggctgacgctggaaataaaagatgaatacatttaagcgctactggcaacagcttagcctacgggagcgtgccctggtattggggggcggaggcctggctgtcgcgtgtctgttttattacatcctgtggttaccgtggcggcagcaggcggcgcaatggcagcgcacgattgccgatgaaaagagcacgatagagcggatgttgcagctggcgccacgtatacgccaacaggatacacggccgctatccgcccgtgacgaaaatctcagcgtgtcggcggttgttacgcagagcgcggcagctcagggggtgagtatcacgcgtattcagccgcagggacaacagctggcaataacgctggagcccggcgactttaacggattcatgcattggctgattactctggagcaacagcatcgcatccatattacggccctggaggtggcagcgtaccgcgataaaccgggatgggtagcggtaaataaactgacgctggagcgtaaagatgagccttaaactcaagaagctggtgcttgtattggtctgttatctgctgctgctggcgggaaatgcccctgccggggtagtgcgcgtttttatgcccgccgatattaaggccggtcgcttttccgggtctttatggcaaggtcgcgtgtaccagctcacctggcgcaacgttacgattgaagacgtccattggcagctcactttctcctcctggcggcctgcaataaaagtcgcgttgcgggatccccggggcttgcagggaaccggaactttacgcggttggcacgatcttgaatggtatgagtggcaactttccgcgcctgccgattttgtccgccagcagctgtcgctggcgttagcgatgaccctcaaaggggggctgcagctgcaattgcaccagggggagtttacctcccatggctgccagcgtcttggcggcgtcatcaagtggcggcaggctcagatggcgacgcctctgggcgatttggatctcaccgatgttgacggagagttgagctgcaacggaaaaggggaactggcgttggtcctgaaacaggactctcctcatctgaacatcgagggaaggggagtcgtgggggctggcggcggctatcgatttaacggactggtgcggagcggaccgatgctgcctgaggtcatgaaaccattgatagcgcaggttggccgggctaacgagcagggccagatagcctggcaaacgcaggggcaattattttgatccgtgatgtccccctccgacaggaaaaagagggagatgctggacccgcagagggcgctttatgacattattagtggctttttcatccacgtatcccatcatttggtggtttggtcttggggcgacaggcgctatcgtcgggagttttctgaatgtggtgatctgccgcttacccgtaatgctcgagaaacactggcagcgtgaggcgttgctgcagctgtcactgccttcacctgaacccacggcgcgctttaatctggtattgccgcactctcgttgcccatattgtcatactcctgttgccgcaagggataatatacctctgctgagtttcctgttgttaaagggcaaggctcgctgttgcggcgcgcctatttccgcgcagtatccgctggttgaggcggccaccgctgcgctgtttgtcttaaccgcacgtgtatttccgccggggctggcgctgtgtggcgcctgggtattcgtctcttttttattgatcctggccgttattgattatcaccgacagctgctacccgatgtcctgacgctgcccttattgtggatcggcttactgtttaatcttcagtcgtattttgtttcgttgccgcaggcgacgattggcgcagtggcaggatatctctgcttgtggtgcctgttctggctgttcaagctactgacaggcaaggatgcgctgggctatggcgattttaagctactggccgcgttgggagcctggctaggctggcaagcattaccccatgtggttttactggcggcgttaagcggattgctgtttgcgttcgtacagcgaggaggggcaaaaaaagatctcaatcagccgctggcattcggcccgtggctggcgttagccggtgtggcaaatatgctgctatttcagggtatttgaccgagagacggttgatgttcgcgcccggaaggcgggtcaacggcgatatccttcctgcggagcgctaacggcagaaaaagaggggggaaagagagggggaagaaagccccgggcgaggcgcagctgcgccatgacccgggcgttcccggctgaagggaattaaatctcggtaatggtcgtcgcctgcggcaggcgtgatttcggcagcgtcgcgttgaagtcttcgacgctatgatggccgaccggcaccaccaccaggctggtgtagccctgggctttcaggtcgaattcggcatcgagaatcgcgaaatcgacgccttcaatcggcacggcgtccaggcccattgccgccacgcccagcaggaagttgccgacgttgagataaacctgcttcgccatccactgatcgtcgtcgtgcagctctttgcggtgcatatcggcaaagaaggtgcggcctttatggttcgcggctttggcgtcggcgtttgcgaagcggccatcggcctcttcctggttcaccacgcgctcaagccaggcgtcgtccattgcggttttggcgcagaacaccaccacgtgggaggcatcgagaattttacgttcgttaaacacgtaggtgccgctcgccgctttggcaacgcgcgctttgccttcatcgctgctggcaacgataaagtgccacggctgggagttggtgcttgacgggctgtactgcagcagcgttttcaggttttccgcctgctcggcagttagctttttggtggcgtcaaatgccttggtggagtagcgctttaaggcaaccgatacgatatccatactcttcctcactgtttacaaccccttgcgggtgcgtttcgtgaaggaagagtacagcgatggcgggcaaatgataaggggcaaaaatgcgataacacttatcgcgcagcgctgaaaatcaccccggacgtaggcgctgctgctcttttttgctgagtttatcgacgatcagattccacgaatcatcgatcagctccgccagcagatccacgctgatgtcctcgccgggaactacggtgatccagtgctttttgttcatgtgatagccgggctcgatgctgcggtaaatcgcctgatgaagcagcgatttttgcggatcgcacttcaggttgaccagcgcgcggccgcgtaccgtcgcggtgagcataaaaatcttcccgccgactttaaacacatcgtactccgggccaaacggccagcagtgctcggtaaaggggagctccagcgcgatacgatgcgcgttgtcatgcagcgagcggtgatccatcagctattgtcctcggcaagggcctgccacatggcttcaaagcccagctcgacaaaacggacggcgcgctccggctcgtggctggcgtattcaatggtggtttcggccagcgaaagaaacaacgcatcgccgaaggtacggtactcgtcggattgaaaaacgggtttgattgagcgctggcacagttcattgagctcgggaaacatctcctggacgcggttgcgggtttcgtcggtgatccgttcactcagcgccatccggcgaatcgctttatgctccatggggttacgtacgccccagccgatatagctattccagatattgcgcgtgttctcttttggccgggtttcgttcgggttgagacccgctatcattgtctgaaccaggtctgcttttatggtcagataaagctcgttgagcaaatcgtccttggtggcaaagtagcgaaacagcgtaccctcggcaacccctgcgctgcgggcgatggcggaggttgaggcggcgattcccgattgggcaaaggcggcggttgctgcctccagtaacgcttgctttttatcttcactcttaggacgagccactacactttacctcactcataataaaaccacgatctaagcacgcccggcatgggcgctgcaacgctgtctgtcaaaatttgaaaatcgtcttgacgactttcagcttcttcctaataatgagtgcttactcactcataatcaagccttataacaaaaacctccaggaagggggatttcgccaggtcaggatatgaaccgtgtcactttcagcgtggtcgccatcatgttattagcgtcagcaacaactttgccgtttgtgttaaatgccggatttggtcaggcgccgcagggcgcgcagctcagcctggtggagcagtcgccgcactatcacgacggtcagtttcacaatcagcttccgacgccggggtttaccgggcaaaaaaatatgctggccgcatggtgggagtttctggtcgccaaacgtgaaaatgccagaccggcgcagccgctgccgctggtgaacaccgatctggccagcctgccgtcagggcaggacgtgatggtctggctcggtcactcctcctggtacctgcagctggcgggcaaacgcatcctgatcgatcccgtatttagcaactatgccgcaccgttttcgtttattaataaggcctttgccggggattacccgtggcacgctgagggcatgccggatatcgacctgctgattatctcgcacgatcattacgaccacctcgattacgccaccatcaaagctctgatgccgaaggtcaagcgcgtggtgacgccgctgggcgtggggtcgcacctgcgctactggggaatggagagcgcgatcatcagcgaggcggactggaatcagtcgctgcaggtgagcgatgagctgacggtacacgtcctgcccgcgcgccacttttccggccgcggcctcaagcgcaaccagaccctgtgggccagctttatgttcgttaccccgcagcagaaaatttactacagcggcgacagcggctacggcccgcactttaaagccatcggcgaacagtttggcgaagtggatttggcgatcatggaaaacggtcagtatgaccaggactggaagtacatccacatgatgccggaagagacggcgcaagccgctgacgatgttcatgcacgcgcggtactgccgggtcacgccgggcgcttcgtgctggcaaaacacacatgggacgatccgtacaaaaggctggcggaggccagcacagggcgaccgtggcgactgctgacgccaatgttgggtgagccggtttgggtcgctgataaaacgcaatcatttaacgcctggtggcgctaacgatgagagtggttcaggaggagagaggacatatgactatttccgctcaggtcattgatactatcgtcgagtggattgatgataatttgcatcagccgctacgtattgacgatattgcgcgccacgccggttattcgaagtggcatttgcaacgactgtttttacagtataaaggggagagtcttgggcgctatatccgcgagcgtaagctgctgctggcggcccgcgatctgcgcgataccgatcagcgggtctacgatatttgcctgaaatacggttttgactcgcagcaaacctttacccgcatcttcacccgcacgtttaatcagccgccgggtgcctaccgtaaagaaaatcacagccgcgcgcactgaaaagcgcccgccgggggaagaccggcggacgcttttttaccaggcgtagttgaccgtcgccgtcaccgtccgaccaatgccgtagaagcaggcgctatcgctggcgcaggaggccacgtatttggtattggcgaggttgttgacgttgaactgcactttcgcccctttcaggctcgaattcagctcgcctaactcatagctgaccatagcgtcgtacagatccactgccggtactttaaacgtgtttttcgcatcgccgtagctggtgccgatatagcgtacgccaacgcccgcggtcaggctttttaacgcgccgtccggcagggtatagctggtgaacgccgaagccatatgggtcggaatgcgtgccggcgttttcccttcggtaccgacgacggtggtattgacggtttccgcgtcggtataggtgtaagacgcgatcagattgaggttatcgaagaccgtcgcgtgcgcttcggcttcaacgcctttcgagcgcactttaccgctgttttcaaaccacccggccgcgctgttgtaggtcgcgacgttgctctgcgtcagatcgtacagcgcgagggtcattaacgcgtttgggtcaggctggtatttcagacccacctctacctgtttgccttcgctgggatcgaatggtccgacgcccggcgcgcggttggtctgtaggttaggttcgaaggaggtgctgtagctgatatagggggaaagaccggaatcaaaggcgtacagcaggccggtgcgccaggtgagcttattatcattctgctgggtgctgctggcgtcggtaaaatcggtggtgcgtacttccgcccagtcgtagcgcccggaaactaacagttcccagtttcgccagctcagctgatcctgaatatacaccccaacctggtcgagattttgctgttcattagtggcgggactgaagacgctttcatcgacgctaaccccgtaggtcgggctgcgccagtcgatatcgtactgcgagccgccggcccgaccaaggtactgcttatccttactggttttgtaatccacaccgccaatcaccgtatgcgccacctgaccgctggcgaactgcgcttcaagctggttatcgatgccaaactcatcggtctgacgctgttcatgctgggcgcggcgggagagtaccgagctgttggcggcgctggtggaataaaccaggtagcgatacttctgtttgatggtggcgtagcgggcgttctggcgcagagtaaaggtatcgttgagctggtgatcaaattcatagccaatcatcgtttgttcacgccacgactggttgtagctgggatcgctgacgttaaaatcgcgaggaatatagctgccgtcgacgctttccacggtgccgtaacgcggcaggaagttacggtagccggcgtccgggtctttctgatagctggttaacagggtaaagcgcgtggcgtcatcaggataccaggtgagggcgggggcgatagccatccgcgtctctttatagtcatcgatctggttattctgggtgcgggcgatcccgttcaggcgatagagcaggtggccgtcatcgctcagcgggccgccaacgtcgaaagccccttcggcgagctggttattgccggtacggaactgtacctcatgaattggctggctggtcgggcgtttgctggtcatgctaatcagcccgccggggttgacctgaccaaacagcaccgaggccgggccgcgcaccagctcgacgcgttccagcagccacgggtcgaaagtgccggtttgtgacgaggcggtggcaccgtagctcaggccatcgaggaatttgggcacgtagctgaagccgcgcacgaatacttcgtcgttgcggttagatgaacctcggtattcggtaaaaacgcccgcgctatagcgcagcgcctgggaaaccgaggtgacgtccagcgcccgcatttgatcgcgggtgaccaccgataccgactgcggcgttttgacgatctccgcagcggtctttgttgccgacagggtttttgtcgccactattcccttcagcggcgctgtaggatcctcgccgctgccggcggtgacgacgatcgtttcctccgctgccagcgccggcccgccaaacagagatgccgccacgcccgcggcccagaaagctgttatcttattatatttaaacatgtttattttttatccttggttgaatcgccatcaaaaaacgcccgagtcgaggggaatcgaccggcggttatcattaacggtgttaatgttattgcaaatagttattatttgcattagcgttattaacaaattcttacaaggaactattggctaatgaagacggcgtggagcggcctgctgattggcatgagtaccctaccggcggcggcgatgaactgcgaatctccttcgttacagggggaactggaggggaagttcgacgccagcggcgaggtctgttttgacctgccgacattgggcgagaactacgtcgcggcgaccctctccggcgtcaccgatgcccgactgctggatgacaataaccgccgtctgcgcacgctgctgacgggcggtccggcggacggcgagcaaaccctgctgttttctctgccggtaaatcgcgcctcctcgctggtgctgcacggcgaagagggggcgcgctggcgctttcagtggcagatgcgggaaaccaccgctctggccaaagttcagccgctggatccggtcagcccgcgcctgctgcggctgaagcgtgaactggcggcgggaggttcaacggcgcatttctggcaggagcgcgagcgggaagggacgccaatggtggaaccggtggacgccggccataagcgggtaactttcctgtggcgcggggcgagccgcaacgtgtttattctgggttcgccggcgggggatcacgatccgctgtttcgcctcggggattctgacgtctggtttcgcagctacgtggtgcccgccgataccctcatgcagtataagctggccccggacgtgccgcaggtaaccggcagcgcgcgggagcagcggcgggcgattctggtcagcgcccaggctgacccgctcaacccgaacagcatcaatgccgcccacgaccgctggaatcgccactctctgctggccctcaacgccgcgcgtttttgcaccgcccagcgtatggcgcagccgctacgctacggaaccttaacccgccatcagctgcgcagcgactttctgcaaaatacgcgggaagtgctgatttatcgcccgcggttgccgcagcccgcgcgctggaccctgttgctctttgacggtaaaacttaccagcacgaataccgcctcgccaacgtgctgaacgccctgatcgccagtcaccggctgccgccgattaacgtggtgtttatcgatagtctcgatcattcgcgacgggcgaaggagctgccgccaaatccgcactttgccgattttatggcccatgagttgctgccctggctgaaccgccaggggatcagcctgacccggcaaaaaaccgtggttgccgggtccagctacggcgggctggccgcgtcctgggtagcgctgcgctacccccggcagtttggcaacgtattgagcctgtccgggtcatactggtgggcgccgcaaggggaggaggccggctggctgacccgccagtaccagcagtcgccgcgctatccggtgcgcttctggctgcaggcggggaaattcgaaaccagcgggccggacggcggcatttatgccaatacgcttgaatttgagcgggtgctaaaagagaagggttatacggtgagctttcatccctcctccagcggccacgattacgccgcctggtgcgaagcgctggtcaacggcatgcgcgacctgaccggcttagcgctcaagggaaaaccagcgacgccagacccagcgcagcagcagatactctatggcgcccagcgctaaaaaccacaggcaaaagatcagggtataaagctggttgagatccatcagatggaatgtcgcaaccagcttctgcgccagcgtcaggcccagcgagggcgccggcagcagcaggcaggagagtaaagccagcagcaaaatgccggcggcgctgaggagcgtttctagcggatgtttcattatttgttaatcatcagttaaaaacatattgtccggtaaaaagagaatcaatgcaatatcgtttcgtacgtaattataatacgcattagatattatatttaaacgtcctcgtttattcccatgttaattattttggtaatatttgtgattaagttaattacattgcaatgtaaattaacgtcattattaagccagcgcttttacaaaagtataggtgctatatcctacaagtgtagcgataataatggccagcaggatgtacagcaccagacggcgtccgcgatagattccaaacatagtagacctcgtttagttttggtttattaatattctgcaatagttgttttatagaattaacttaccataaattttgtattggcgagagagtaaatattgcgcaagctcaaattatctcccgcctgtttgaaatttttctcattggcccggaatgattccaggctttccgcctcacggaattttaagggagatatattttgaccaaaacgatcaaaactaataataccaccccctcaggggatgtcgcgccacgccgcgcatatcagcagacggttgatgcggtgctggcgcagaataaaagccatgccaacggcctaagcgccgccgaggccgccgagcgtttgaagaccttcggccccaacgccttgccggagaaaaaaggcaagccggcctggctgcgcttccttgcccactttaacgacgtcctgatttttgtcctgctggccgccgccgcgctcaccgcggtcatgggccactgggtcgatacgctcgtcatcctgggcgtcacggtgatcaacgccctgatcggccatatccaggagagcaacgccgaaaaatcgctgcagggcatccgcaatatgctctccagcgacgcgcgcgtgcagcgcagcggcaagcatgaaaccatcccgacccgcgacctggtgccgggcgatatcgtgatactgcgcgcgggtgaccgcgtacctgccgatatgcgcctgattgagagccataatctgcgggtcgaagaggcgattctcaccggcgagtcgacggtggtggataaaaccaccgacgcgctggaaggcgaactgccgctgggcgaccgtaccaatatgctcttctcaggcaccaccatcagcgccggcggcggcgttggcgtggtgaccgcaaccggtcaggagaccgaactcggccacatcaaccagatgatggcggggattgagaagcaccgcacgccgctgctggtgcagatggataagctcggtaaagcgattttcgttatcatcctggcgatgatggccgcgctgttcgtcttcagcctcgcgctgcgcgacattcctctcggcgagctgctgctctccctgattagcctggcggtggccgccgtgccggaaggcttaccggcgattatctcgattattctctctctgggcgtacaggcgatggcgcgtcagcgggcgattatccgcaagctgccgacggtggaaaccctgggcgccatgaccgtggtgtgctcggataaaaccggcaccctgacgatgaacgagatgaccgtcaaagcgatcatcaccgccgactgctgctaccgcgtcgaaggcgacagctacgagcctcagggtaacatctgcctggaaggcagcaacgagccggtgcagattaaaccgggcagcgtgctggaaacctatctgcgcaccatcgatctgtgtaacgacagccagatgattcaggacgagcgcggcctgtggggcattaccggcgggccgaccgaaggggcgctgaaggtgctggcggcgaaagcgcagcttgcgcccgtcgacgcgcgcctggtggcgaagataccgttcgactcgcagtacaagtacatggcgacccaccagaaaatgggcgacgtcgagcaggtgctgattaccggcgcgccggacgtgatttttgccctgtgccgccatcagctgagcaagcagggggcggtgccgttcgagccgcagtactgggaagaggagatggcgcgctttgcccgccagggcctgcgtatggtcgccgccgcctacaaaccggccaccgttggcagcaccacgctgacccacgacgatctgcgcgaaggtctggtcttcctcggcattgccggaatgatggacccgccgcgtccggaagcgattgacgctatccacgcctgccagaacgcggggatccgcgtgaagatgattaccggcgaccacccgcagacggcgatgagcattggccagatgctggggatcaccaacagcagccaggcgatgaccggctatcagctggagcacatggacgacgccgagctggcgaaagccgccgttgagtacgatatctttgcccgtaccagcccggagcacaagctgcgcctggtaaaagcgctgcaggataacggcgaagtagttggcatgaccggcgacggcgtcaacgacgccccggcgctgcgccaggccgacgtcgggatcgccatggggattaaaggcaccgaggtgaccaaagaggccgccgacatggtcctgaccgacgacaactttgccaccatcgccagttcggtcaaagaggggcgtcgggtctacgacaacctgaagaagaccattctgttcatcatgccgaccaacctggcgcaggggctgctgattatcatcgccctgctggcggggaacatcattccgctgacgccggtgctgattctgtggatgaacatggccacctccgcgacgctctccttcggcctcgcgtttgaagccgccgagcgcaacgccatgaaccggccgccgcgtaaaaccggccagcacgttatggacgccttcgccgtctggcgcgtcgctttcgtcggcaccatgatcgccgtcgccgcctttatgcttgaagcctggctggcgccgcgcggccacagtccggagtttatccgcaccgtcctgctgcagatgctggtcaccgcacagtgggtttatatgattaactgccgcagcagcgacagcttctcgctgagcatgggactgctgcgcaacaaaggcatctggctggtgagcggcgtgctgctgctgatgcagctggtcatcatctacgtaccggtgatgcagacgatgtttggcaccgaagggctgccgctgcgctactggttcatcacgctggtcatcggtatcgcgatgttcctggtggtggaagttgagaagcgcctgacccgtcgtttccgcaaagccgcatagcgtgtctgacccgcccggcgtcccttctcctgaggggggagggacgccgcatcgtcgtaaggaattccccatgaacaagattatccgctccgccctgctggcctgcggcctggcaggctacgcgcttattgccgccgccgcgccggctattccggtgcgcgtcgccaccgtggaaaacgcgccgcatgccgatgaacggcaaatctccggccgagttgaggccattcacgccgtcgatattcgcgcccgcaccgaaggaaagattgtgcagcgccacttccaggatgggcagtacgtcaaccagggcgatccgctgtttacgctggatgacgcccagccgaaagccgcgctggcgctcgcccaggctgaactgaaaagcgcgcaggcttcgctacgccaggcccagcagcagctgagccgctaccagcagctgaaaaataaccacgcaatcagccgcaacgacgtagacaccgcgcagatgcagcgcgatgtcgccgccgccgccgtcgagcaggcccgggcgcgcattgccgcccagcagattacgctcggctacacccgcattacctcgccggtcaccgggcgcgtcggccatagtccttttcacgtcggcggtctggtgaatcccgccagcggcgtgctggtcgatgtggtccagcttgatcccattcgcgtggcgttctcgctggatgaaaccgcctttttcgcgaaagcggggcagcacacggatatcgccgcgctaaagcaggcgtggctggcgcaggtggatgtcgatggacggcgtgaagtcggcgccctgacctccgtcgataaccgtattgatagccgcaccgccagcgtggcgctgcgcgctgagtttgccaacccgcagcaccgtctgctgccgggcggcaacgtcacggttttcttccggccgcagcagcttaaggagagcccgatcatcccggcctctgcgctacagcaggatgcgctgggcttttactgctgggtactgacggcggacaacaccgtgacgatgcgccgtttagcgcccgccggtcagcatggccaaagcttcgtggtggccgatggtctgaaagcgggggagcgcgtagtgacggaaggcgcccagcgcctgcgtgacggcgcggccgttcagctgctgagtgaataagggagaggcgatgctcacattttttatccgtcgcccgcgctttgcgatggtgattgcgctgctgatgacctttgtcggcgcggtctcgctgaagctgatcccggtcgagcagtatccgcagattacgccgccggtcatcaacgttagcgccagctggccgggcgccagcgcggcggacgtggcggaagccattgccgcgccgctggagacccagatcaacggcgtcgatcatatgctctatatggagtccaccagttccgatgaggggacctacagcctgagcctgacttttgccgccgggaccgatgccgatttagccgcgatcgatgtgcagaaccgcgtgtcgcaggcggtggcgcagctgcctgccgacgtgcagcagaacggcgtacaggtgcgcaagcgggcgacgaacctgctgatgggcgtgagtctctattcgccgctcggcacgctatcgccgctgtttgtcagcaactacgccagcactcaggtgcgcgaggcgctggcgcgtctacccggcgtcggggaagtacagatgttcggcgcgcgcgactacagcatgcgcatctggctgcggcccgaccgcatgaacgcgttgaatatcacaaccgacgatattgcccaggcgctgcgcgagcagaacgtgcagggcgcggcggggcaggtggggacgccgccggtatttaacggccagctgcagacgctgaccatcaacggtatcgggcgactcagcgacgccgccggcttcgggcaaattgtggttcgcagcggcgaacgcggccagctggtgcgcctgtctgacgtggcgaccattgagctgggcgcgcgcagctacagctccggcgcgcagctgaacggtaaagattccgcctatctcggtatctatccgacgcccaccgccaacgctctgcaggtcgccaccgcggtgcgcgctgagctgacccggctgcacgcgcgtttcccggcggatctcacctgggaagtgaagtttgataccacccgctttgtggcggcgacgatcaaagagatcggcgtgtcgctggcgctgacccttatggcggtggtggtggtggtttcgctgttcctccagagctggcgggcaacgctgattgtcgcgctggcgatcccggtgtcgcttatcggcacctttgccgtgctttatgcgctgggctacagcgccaataccctgagcctgttcgcgattattctcgccctgacgatggtggtggatgacgccatcgtggtggtggagagcgtggaaacgaaaatggcggaggggctggatcgcggcgccgcgaccgccgaggcgctgcggcaaatcgccgggccggtgatcgccacaactctggtgctgctggcggtgtttgtgccggtagcgatgctgccggggatcgtcggcgagctgtatcgccagtttgcggtgaccttatcgacggcggtgacgctgtcgagcgtggtggcgctgaccctgacgcccgcgctgtgcgcgctgctgctgcgtccgcggccgcagcagccagccgccatctggcgcggttttaaccgcggtctggatacggtgcgcgatggttacgggcgtctggtcgggaggatgaatcgtcgcccctggctggcgctggcggcgacgatggcggcggccggagtggtggtgtttagctttaccactatgccaaagggttttctgccgcaggaagatcagggctacttctttgccagcgtgcagctgcctgaagctgcctcgctggagcgtaccgaagcggtgatggcccaggcgcgcgagctgctgttgttgaatccggcggttgaggatgtgattcaggtctccggttttaatattctcaacggtaccagcgcttcaaacggcggatttatctcggtgatgctgaaggactggcaccagcggccgccgctggaggcggtgatggaaaaggtgcagggccagctgatggggctaccggaggcgacgatcatgacttttgcgccgccgacgctgccggggctgggcaacgcctccgggtttaatttacgcattctggcccaggccggacaatcgccggcggagctggagcaggtgacgcatcaggtgctgcggacggctaaccagtacccgcagctgagccgggtatttaccacctggagcagcaacgtgccgcagctgacgctcaccgtcgatcgcgaccaggcggcccgcctgaacgtaccggtggcgaggattttcagcagcctgcaaaccgcgtttggcggcacccgcgccggcgatttcagcatcaacaatcgtgtctaccacgtggtgatgcaaaacgagatgcagtggcgcgagcgggcagagcagataagcgagctgtacgtgcgcagcgacagcggcgagcgggttcgcctgagtaacctggtgacgattacgccgacggtgggcgcgccgtttattcagcagtataaccagttcccgtcggtatcggtgagcgggtcggcggccgaaggcgtcagcagccggacggcaatggcggtgatggagcagattttacaagcgaacctgccgcacggttatgattacgcctggagcggcatctcctggcaggagcagcagaccggtaaccaggcggtgtggatcgtgctggcggcggtagcgatggcgtggctgttcctcgtcgcccagtatgagagctggacgctgccagcgagcgtgatgctgtcggtgctgttcgccatcggcgggtcgctgctgtggctctggtgggccggttatgccaacgatgtgtacgtacagataggcctggtgctactgatcgcgctggcggcgaaaaacgcgattttgatcgtcgagtttgcccgggcgaagcgcgaagagggaatgtcgatcgtcgatgccgcccgcgaaggggcgacccgccgcttccgcgcggtaatgatgacggcggtctcttttatcatcgggattgtgccgatgatgcttgccaccggcgccggggcgcagagccggcggattatcggtaccacggtgttcagcggcatgctggtggcgacggtaatcggcattttatttattccttcgctatacgtgctgttccagcggctgcgcgagtgggcccaccgccggatgtaggtggcccgcgcctgtccgggctacagtactgcatattgccgataacccgtagcccgggtaaggcgtttacgccgcaacccggggaatatgccgcgacgtggtattgctgtggcttcttcccggcttgcgctgcgcttagccgggctaccgggccgcagattgccggtaatccgtagccaggacaggcgcggcagcgccgcctccgggagattttcatgccgctgcggatatgtttctgaaacaacgtgtcatgcagcaatgccctggcccccgctgaaatcggcgaaccggaggaccgaagacaagggctggccgccagggatggcggacagaggcgaatcgagacagtgatgtcgagttgagccgaccgcaggctgaggtccgggaggtgagcgcagtgcgcagcaccgatttctttgcgggaccgcggggattgtaaagggggagacggttttctccccttttacccgttcacgtgcctcgatgagacattttctgcgacttgatggtgaacggaacccctcaacaccgtcccggaggcggcgctgcccaatctccctccctcaggcaccgggcccggaaatcccgggtcgcggcgtaaacgccttacccgggctactccccgcagacgatgttatgaaaactatctgctctccaccgcgatcatggtgacgaacggatggtactgccacggcacgctgccgcctttctggtacatcttcgaaatggtaccgtcgagatagagcatctggcgcacgttgagcctggactgcgcgtagcaggcaaaatcatagaaattggtttcgcgcgcgctgagcataaagaccactttgccatcgccggtgatgcccacgccgttacgcagcttgcgcgagctggcggacggcttcaaccgccagttgatcttgccgttttcaatcagcatcggcccggactgcacggcgtagcggatggccggcgacggcctgaatttatcgatgctgacaatccccgcgttttgcccgcgcagataaaacaccccgccgggacgaataaaaaagttgccgccgccggaagcgcggttaagcggggtcagctgcctgcctttctcgatatacagccccagcggcgcgtaggctttatcataaattccaccgttcatcgccatctgcacctgtccgttgtggtcgatatccgccagcagggagcgcagcgatccccaggctttgccgtcctctttttgccagtacatcacgatgcgttcgcgctgcggatcaacggtatagctttgcagcgtcagcgacgggtcggtcagcgagcacttcccgctggcgaaagcgggcagggataacagcagcagcggcagaagagagaaaaagcgcacgacaggttccagacagacgacgaaagcgtgcagtatagcgttttatcgccgctacgccgtccagatttcgcagtgcttttgtaccagcccgatcaatgaaccgccgttggcgacgaactcgcgcatttgctgcggctcgctgcgatcctgcttcgcctggcgcacaatcgcctccagcgcgctgccggcattcagcttgtgggcgctgggggccagcctatccgccagctgtaaaatttcttcgcgcaatgttcgttgttcgccgccgttaacatcggtattgatcccatcgagcccgtagcgacaggcctgatagcggttgaaggggtagagcagataatcctcgggctgatgcttaaacggccgctccgtcagcagccagcaggcgatgatctgaataaacccggcgatattcaccgcctgagcaatcgtcagcggcgtatccatcacccggacttcgacggtaccaaagcgcgggctggggcggatatcccagtgcagatccttcatgctgtcgatcatgctggtatagctaagacggcgaaacagaccggtaaaagcctgccagttattcacccacggcatcgggccgttatcgggataggcggcaaaaaggttaagccgcgaacaggcaaagccgctatcggtcccgtcgagccagggcgatgccgcattcagcgcgataaaatgcggtacgaagcgcgacaggccgtgcagaagatagatggcatcatcgccgttttgacaccccacgtgcacgtgctggccgaagatcgtcgcctgcttcgccaggtaaccaaagtgctcgacggttttcaggtagcgcgggttatcgctgatctgctgacgctgccagctttgaaacggatgcgttccgccgccgcagatttgcacatgatggcgggcggcggcgcgcagcaccgcctgttgaatcgcgctcagctgcgcggtggcctggtggatatcgcggcagacgccggtggcgatttccagcatgctttcggtgatgtcatgtttggcctcgcccgctttcagcgtgccctggacctcatcaataagcgcagaagagtcctggctcagatcgaagcccggcgggttgacgacctggagctccagctcgatgccaagggtaaacggctcggagcggtgaaaatcaggtaacggcatggcgactccctctttctctttatcagaaagtatatacccgtcatacttcaagttgcaggtgtgttggctttcctcgctcaccccagtcaattactggagtaagctcctggggattccctgcgtcgccgccttcctgcaactcgaattatttagggtatagaagacaacgcctcaaactgatgatctgccggacattatgaatttaatttatagaaaataacgccacgtgattatccctttaaaaagaaagtaaggctggtgcaatcctgcaacagaattcccgccggtggtgcaaaaagataaggttattctattttttaaataaaatcatatagatgatataagtcattcttattttataagccatttcacgcttattccccgcgcgttcagaactggtatgtatcttgcctgttaaatagcgacttttatttaacagggacaatgtgatgctgaagaaaaaaatattttcgcgtaaatgccatctcgccgttgctgttagcggagcattggcgctgatcgcctctttgccggccaatgcctcaaccctgcggatcgccatgaccgccgccgatatccctttgaccctcggccagcccgatcagggctttgagggcaatcgcttcaccggcattccgctctacgacgccctcgttgaatgggatctctctcagggagaaaagcccagcggcctggtgccggggctggcgaccgagtggcacgttgacccgcaaaatcaaagccgctggattttcaccctgcgcccgggcgttaagtttcacgatggttcaacggtcaacgccgatgccatcgtctggaacgtggataaggtgctgaataaagccgcgccgcagtatgccccgggccagataggcaacaccctctcacgcatgccgaccctgaccggcgcggaaaagattgacgaccacaccgtggcgctgaccacctccgaaccggacgcgctgctgccgtacaaccttaccaacctgtttatcgtttcgccgacggcgtggcagaagctgtatgacgcggtgccggcaaacgccggcgatgccgccgcgcgtagtaagcaggcgtggaccgagttcgccgcccacgcggtgggcagcggtccgttcaaaatggaaaaactggttcctcgccagcagctgatcctcgataagaaccccgactactggaacaaagatcgcattccgcgagtggacaaagtggtgctgatcccgctgccggaagctaacgcccgcacggcggcgctgctctcgaagcaggtggactggatcgaagccccggccccggacgcggtcgatcagataaaagcccagggctttaaaatctacgccaacacccagccgcacctgtggccgtggcagttctccttcgaagagggctcgccgtggaaagatattcgcgtgcgcaaagccgccaacctgtgcctgaaccgcgcggagctcaaaagctatctcggcggctatatgaccgaagcgaccggcgtctacgaggccggcagcccgtggcacggtaaacccaccttccagatcaaatatgacccggataccgcccgtaagctgatgaccgaagccgggtatagcgccgggaaaccgctgcacgtcacggtcgccacctcggcctccggctccgggcagatgcagccgctgccgatgaatgagtacatccagcagagcctgaaaagctgcttctttaacgtcgacattaaggtcaacgaatggaacaccctgtttaccaactggcgtctcggggcgaaagatccgtcggcgaaagggatcgacgcgatcaacgtcagcgccgcggttaacgatccctatttcggcatgatccgcttctccaccgcgaaggccttcccgccggtggcgaccaactggggctacttctcgaccccggaaaccgaaaagctggcggcggcggtgaaacacgcgtttaccccggctgaaatggataaagccgcgggtgaactgcacgccgcgctggtcgatcaggtgccgttcctgttcgtcgcccacgatgtcggaccaagggcgatatcgccagccgtcaccggtgtggtacagccgcaaagctggtttatcgacctcagcctggtgagcaaaaaagagtaatcgacacgggagcaagagatgatcaatacgctgctatatcgcatcctgctggccatccccaccatgctcggggtcgcggtgatctgttttatgctggtgcagatagcgccgggcgacccgctggtatcggtgatgccgccggacgcttcggaatcgctgcgtcagaccttaatgcaggcctacggctttgataaaccgctgccgctgcagtttgtgcactggctatggcgggcgctgcacggcgatctgggcatgtcggtcgctaccgggcgcccggtcatcgatgaagtgatgacggcggtcgcctactctctgcgtctggcgctgctggcgacggcgatcgggtttgcgctgggcagtctgttcggttttgtcgccggctactttcgtaacagcattattgaccgtctggcctcggtgctatccgtgtttggcgtcagcgtaccgcactactggctggggatgctgctggtcatcgtttttagcgtcaaattcgcgctgctgccggcgaccggcggcgggccaatcggcgaggtgggctggcagtggaactgggaacacctgcagtttatgctgctgccggccttcacgctgtcggtgatcccgaccggcattatcgcccgcaccgttcgctcgcaggtggcggacattctcagccaggagtttatcgtcggcctgcgcgcccgggggctcaacgagtcgcggatctttctgcacgtggtgaaaaacgccgccccgaccgcgctggcggtgatggggctgcaggtcggctatctgatgggcggctcgattctggtggaaaccgtcttctcctggcccggcaccggtctgctgctcaacaccgctatcttccagcgcgatctgccgctattgcagggcaccatctgggtactggcgctgttctttgtcctgctcaatctgctggtggatattctgcaaaccagtctcgatccgcgaattaagaggagctgacgatggtggataccgtgacgaccaaaggcattaccgtctctgccgcgacggttgccagacaaggctactggcgcggcgtgtttcgccgtctgctgcgcgacccgggcggcgtattcgtcggcgcgatcattctcatcctgctggcgctggcgctgttcggtccctggctaatcgtgaaagatccgtatcaaacgtcgatgtttttacgcctcaaaccgattggcgccgacggctttccgctgggctccgatgagctcgggcgcgatatgctatcaaggctgattctcggcacccggctgtcgctgtttatggggattgtcccggtggtgttcgcctttttcatcggcggggcgatcggcatcatcgccggctatgcgggcggtaaaaccaacaccctgattatgcgcaccgtggacgtgttttacgcctttccctcggtgctgctggcgatcgcgctctccggcgcgctgggggcggggatcggtaacgcgctgctctcgctgaccctggtgttcgtgccgcaggtggcgcgtatcgccgaaagcgtcaccgcgcaggtgcggcatatggactatatcgacgccgcccgggccaccggggccagcgcgttcaccattattcgcgtccaggtgctgggcaacgtgctggggccgattttcgtcttctccaccggcctgatttcggtgtgcatgatcctcgcctccgggctctcttttctcggtctcggggttcgcccgccggagccggaatgggggctgatgctgaacaccctgcgtacggcgatttatacccagccgtgggtagcggcgctgcccggcctgatgatttttatcacctccatttcgttcaatatcctcgcggaccgcctgcgtgcggcaatggcgattaaggagtaagcgatgcaaccctttatcaatatcgacctcggcggaccggcgcagccgctgctgaaggtcaacaatctgctgaaacattttcccgccggcggcggcaaagcgcgcgaagtggtgcaggcggtggacgacgtcagtttttcggtgatcaaaggcgaaaccctcggcgtggtgggggagtcgggctgcggtaaatccaccaccgcgcggctgctgatgcagctgcttaagcaggacagcggggagctgatcttcgatggtctggaggtgggctcatcgcgcctgccgatgaaagcgtatcgccgccaggtgcagatggttttccaggatagctacgcctcgctcaacccgcgcatgaccatggaagagagcattgcgttcggccagcgggtacacggcgtcagcgccaaagaggccagcgagtacgcccgctatctgctggcgcacgtcggccttgagccggaacgttttgcccatcgttatccgcacgcgctttccggcggccagcgccagcgggtgaatatcgcccgcgcgctggcgatgaagccccgtctggtgatcctcgacgaggccgtctcggcgctggataagtcggtggaagctcaggtgctgcagctgctgcaggagctgaagcggacgctggcgctgacctatgtgtttatcagccacgatctgcacgtggtgcgctggctgtcggaccgcattctggtgatgtatctcggcgaggtggtggagattggcccggcggagcagctgtttaccgcctcggcccacccctatacccgggcgctgttaagctcgatgccgtcgatggacccgcacaatcgcaccttaacctcgccgctgagcggcgatccgcccagcccgatttctccgccctccggctgccgctttcatacccgctgcccgcacgccagagcggtgtgcgccgaggtgaaaccgacgctcgaaagcgtcggcgaggggcaccagagcgcctgcctgatggcgcagcccgcgtcgccctggcatcaaaatatcgccattcaggaggtcagccatgtcgcatgaagcctacgtccatatccgcgacctgcgggttgagtttcgccgcgacggtcagacggtcaacgcggtcaacggcgtctcctttgatgtgcaaaaaggcgaggtgatggcgctgatcggcgagtctggctccgggaaaagcgtcaccctgcgcgccctgatgcggctgcacccgccgaaaagcagcgtgctttccggtaccctgagggtcggggaagaggatgtgttgaacatgagcgccgggcagctgcggcgctaccgcggcgcgcgctgcgcgatgattttccaggagccgctgctggccttcgacccggtctataccgtgggccagcagattgtcgaggggctgcgtcgccatgaaggcctgtcgcggcaggcggcgcgggaaagggcgctggaggcgctgcgtcaggtgcgcattccgagccccgagcggcggctggatgcttacccgcacgagatgtccggcgggatgcgccagcgggcaatgattgccctcgcgctctcctgcaacccgcagctgctgctggcagatgagccgaccaccgccctcgatgccacggtgcaaatccagatcctgattctgctgcgcgagcagcaaaagcagcgcgatctgtcgattatatttgtgacccacgatatcggcgcggcggtggagatcgccgaccgggtggcggtgatgtacgccgggcgcatcgtggaggaggcgtcgatcgaggagattctgtatcgtccgcgccatccctatacccaggtgctgctgggcagccggccgaaagaggggttgaaaaagggcgatgcgctgcactgtatccccggctcaccgccggatctctcgcgcctgccgccgggctgcgcgtttgccgaacgctgtccacacgcgcgccccgcctgcgcgcaaagccagccgacgaccgaaccggccgggccgcgtcacgtggtaagttgccatcgctggcgtgagctgagcccgtccgttgaaaaccaggcgctttacgcctgaggccaggaggaaaccatcatgcaggacgacattcgcgcctttatgccctatccgccgcatccggtggcgcatgcgctcagcgggccgctgagcggcttaacctttgcggtcaaagatctgttcgacgtggcgggctaccccaccggcgggggcaatccgcacctgctggcgctgtccgggattaaaaaccgcaccgcgccggtggtgcaaaagctgttagataacggcgcgcgctttatcggcaaaacccataccagcgagctggcgtattcgatgagcgggcacaacgtgcattacggtaccccgcgcaacggcgccgcgccgaatcatatacccggcggatcgtcgtccggctcggcgtcggcggtatcgaacgcggcgtgcgactttgccctcggcagcgataccggcggctcggtacgcacgccggcgagctactgcggactgtttggcctgcgtccaacccacggccgtctctccctcgacggctgccagccgctgtgcgccaccatggacacctgcggcttctttgcccgctcgccggaggtcttttccgccgtcgccgcctgtctgttcgatgctgaacgcgcggatttcaacggcgtgcggctggcctgccacgatgggctgttttcccgcctgccgctgcgcagccagcaggcgctgctgccggtccgccaacggctggcgcgctttttcggcccgttagcgccgctcgacgcgccgctgcccgacgcggacgatatttatctcgccttccgccagattcagggctacgaagcgtggcaggcgcagggcgaaaccattgagcgctatggtctgcagctaggcccggacgtccgcgagcgctttttctggggcaaagcggtcacccgcgcgcagtttgacgccgcctgccagctgcgcgagcgttttaccgcctggtgggatgcgcagctgggcgatgcggtcctggtgatgccgaccgttcccgatggcgcgccgctgctgacggcgcaggccgaagagatagaagcggtccggcgcctgtctcacgacctgctgttaatttccgtgatgacccaacgtccgcaggtgacgctgccggtcgcccagacgggcggtctgccgctggggatgtcatttttaggcccgcgcggcagcgatcgtctgcttgtcgagctggccgccgcgtttatgcaaggagaccgaaatgagcagtgatgtcctttttaccccgatgaccgaaaccaccgactgccgggttaacggcgagcgtctgtgggagtcgctgatggcgctggcggaaatcggcgccacgccgaagggcggctgctgtcgtctgacgctcaccgatctcgatcgccaggggcgggatttggtgattagctgggcgcaggcggcggggatgcgcgtcaccgtcgataaaatcggcaacgtctttatgcgccgggaagggcgtaatccggcgctgccgccgattgtctccggcagccatattgatacccagcccaccggcggcaaatttgatggcaactacggcgtgctggcggcgctggaggtggtgcgcaccctgaacgatcggcatatcgaaaccgaagcgccgattgaagtggtgttctggaccaacgaagagggctcgcgctttgtgccggtgatgatgggctccggggtgtttgccggggtattcccgctagaaacagtctatgccgcgcaggatgcggacggtaaaaccgtgggcgaggagctggcgcgcatcggctatatcggcagccagacgccgggcgatcatccgattggcgcctactttgaagcgcatattgaacaggggccgattctggaggatgaagcgaaaattatcggtatcgtgcagggcgtgctggggatccgctggtatgactgcgtggtgaccggccaggagtcccacgccggaccgacgccgatgcgcctgcgtcaggatgcgctgcaggcggcgacccgcattatgcaggaggtcgtggcgatcgccgggcgcagcgacgaggggcgcggtacggtagggagggtgcaggtctatccgaacagccgcaacgtggtgccgggagaggtcactttttcgattgatatgcgtaatctcagcgatgcgctggtggatgagatggaccgccagctgcgggcgtttatcgccggggttgagcgggagagcggcctgaaggtggcgctgaaagaggtgagccactatccggcggcgccgttccacccggagtgccaggcggcaatcgccgacgccgcgcagcggctgggctatccggcgcgggagattgtctccggcgccgggcacgacgcggtgtatatgagctatctggcgccgaccgggatgatttttatcccctgcaaggacgggatcagccacaacgaaattgagtatgcgtcgccggagcacgttgaggccggtgcgaacgtgctgctgcaggtgatgctgcagtacgcgcgggtggtataaacggccgctctccccggtcgcgctgcgcttaccggggctacgggtttccagctgcctgcggggcagtagcccgggtaaggcgtttacgccgcgacccgggatttccaggtccggagcctgagggaggctgattgagtagcccggacaggcgcgtcaagcgccgcctccgggacggtgtggtaggggttccgttcaccgctatttcgcagaaaatgtctcaccgtggtaggtgaacgggtaaagggggagaaaaccgtctccccctttacaatccccgcggtcccgcaaagaaatcggtgctgcgcactgcgctcacctcccggacctcagcctgcggtcggctcaactcgacatcgctgtctcgattcgcctctgtccgccatccctggcggccagcccttgtcttcggccctccggttcgccgatttcagcgggggccagggcatcgctgcatctcacgttgtttcagagatatccccgctgctgtatgaaactctcccggaggcggcgcttgacgcgcctgtccgggctacaagagctacgggtttccagtcgtcagcggggagtagcccgggtaaggcgtttacgccgcgacccgggatttccgggctacaagggcaatacaggctagctgccaaatttgcgcgaaccgataacgcacagaatcacgcccagggttacggtcagcatcaggccgttctccccggtcgcgctgcgcttaccggggctacgggtttccagccgtctgcggggcggtagcccgggtaaggcgtttacgccgcgacccgggatttccgggctacaagggcaatacaggctagctgccaaatttgcgcgaaccgacaacgcacagaatcacgcccagcgtcacggccagcatcaatgggctgacggtttcgtgcaaaagcgccgccgccaggccaagcccgaagaacggctgtaatagctggagctggccgacggcggcgataccgccagcggcgagccctttgtaccagaaaataaagccgataagcatgctaaagagcgacacatagccgagcgcgatccaggcggaaggcgatatagcgccccatgacgctggccgggtcatccacgaggccaccagcataaaaggcagcgccataatcagcgcccagctaatcacctgccagccgccgagctcccgggtcagcttcgcgccctccgcatagccgaggccgcagacgatcaccgccgccagcatcagcagatcgccgctgagcgacgccgccgcgttttgcgtcagggcgaatcccaccaccagcaggctgccaataaccgaaaagatccagaaagcgcggcgcggacgttctccgccgcgcagtacgccaaaaatggccgtcatcagcggcaatagcccgataaaaacgatcgaatgcgctgacgtgacgtgccgcagggccagcgccgtgagcagcggaaagccgatcaccacccctgacgagacgatggccagcggcacaagctgctacgcgcgcggccgtttctggcgaaagcctgcccgtcccgctatcggccggagattgagcgcgctatacgggccaccacgtggaacaccccttcgctggtgagttcgctgatctgcacctggattgaagatggcacggtggcgcgttttgaagcgcagaaacgccaggatgcgcggcggcggcagggggttgcccgcgaggttctcggcgcgcttcccttcgtcagccatccgggttcgtattttgtctggctgcctctgggcgaggagagtcgggccgatcggctggcgaaaacgctgatggagcgccatatttccgtgtcgaccgccgagcctttttgcgttacagcgaacgttccgcaggcgctccgcatcgccctcggctccgttcccttcgatagcctgcgcgcggcgctgaaccaggttcgcgaagccgtggagtatgagcaatatcgctagcgtttcggcggcgagcgatagggtgacttattagtaacgttttatggggtagatagcgggttaatagtcttaaaataaatgttgtttttttattgttatgatttatagggttaattttaaatttaatgacaatataaaattgttacggtagtgtacaaaacacatcaagtacggttgtgctgttgacgctgagcgagcgcacgtcctgaagatacgacgttgttaatcatttcaggggcggagccgcgccctgttctgtacaggatactttttcaatgcagcagctctacctttatatactgattgccagcctgaccattgccagccccgggccaggagtgcttctgacgctgaccaacaccctgaattataatctgcgtaatgcaatggcggggattatcggcgtggcggtggggatgggcgtcatatcgattattgctgccagcagcgttggcgtgatgattaccacctctcagctgacgctgttgatagtcaagggggttggggcggcctatctgatctatctgggcgtaaagctctttcgctcggtgccccgcgcgctgaatcaacctctctcttccgccgattcaacgatgccttccgccagccagcggtttcgtcagggagtactggtgtcgttgtttaatcccaaacccattgtgttttttatggcgctgtttccccagtttattcatccgcagcagccctttattccgcagttcagcgtgctgtcgataaccttctgtattctggtggttgtcattcattcactctacggccttttcgcacacagcgtaaaaacgaaaatgtcgtccgggaatgcctttgttaagctgaataaaaccggtggcatcgtgtttgtgtgttttgccgtcggtcttattgtttccgccgttcatccttatttgtcgtcatgaccgtgagggcgcggggcccggcgttcagcccatctgcgccagctggccgcgcagtacctccacgccctgttcgatggcgtcagggtgaatggcgtggaaccccatccggaagaaattagccggcggcgcgtcgctgagaaaatgccgcgcgccgggctcaatcagtaccccggcgtgggcggcgcgccaggtcagctgctgggtgttaatttgctccggcgtggccagccagaacgcgttggcgtgttcgctgccggggatgatgcggcactccggcagatgctgctgtagcgcgttgttgagacggtcccagcgctgggcagagtcgtaatggtagcgccgcaggtgggtttcatagtggccctgggcgaggaaatgggccatctgatactgaatattggtcggcggatgacgatacaccagccgccgcagcgcccgggcttcgtcaatcagatccgggtcagcgaccataaagcccagccgcaggcccggcgatagcgcttttgacaggctgctcacgtagatcactcttccgcagcgatcgctggccttcagcgccggcagcgggttgagcataaagttactttcagagtcgtaatcgtcctcaataatcaccgcatcatggcgagcggcatgctccagcagctggtcgcgccgcgctttgctcatcgccaccccggttggcacctggtgtccgggagtgacgtagtagtaatcgcagggggcgtcgttgaggacgatcccctgttcatccaccggatgcggcacgatatcggtatcggcaagcagaaaggtgttaatggcctcgcgaaagcagggattctccacgccaacgcgcgtgctggatgacatcagcaggcgcgtcagcaggtacagcgcgttttgcgaaccgagggtaatcagaatctcgtccggcgaggcgacaatgccgcgtttgggcagcacccgggtgcggatctgctcaatcagcatcggcacgtcgcgatcgatgtgatccaccacccactccgggtcgcgaaccccgccgtgcagccagtttgccgccgagcgccaggtcgccagcgggaactggcgagtatccggctggccgtagataaacggatagcggtagttcatccagccggccggcttcagaatcgactcctgctggctgggggtgatttgcagccgcgtgccccagcgtggtgcagaaccctcgtcctgcggtgcagcttccggcgccgaagaggggctggcgtgctggtaatccggatgcaggtaataaccgctgcgcgggcggctcacgaggtatccctcgttaaccagaccctcaaaaaccagcgccgtggtgttgcgcgagacccgcagctggctggccagctggcggcaggaggggagcggcgtgtcggcggaaaaaatgccgcccagaatggcgttaatcagcgtctcgcgcacctgctcctgcaaaccgcggcgcgggtcgaaatcaacgtgtaacaggtgtcggatcatgcctggctccttactcaaacgctcagtacagacactggagcaaattccataccaccctgagaatgactgacacatccgcgcggtgaatctggctctatccggaaatttaaaacgctccctacagtaaaaacgtattcatcagtcgcggaccggaacttccgtcggcacatattttgcaaaaccttttcatgttctggagtgaacacgtctggcgaattaattaggggtgaattaatgaaaaaatcattaggttcaatttgtctgggcgccatcatggcgatggccttttcttatcacgcagccgccgcggatcttccggaaatagaaaaatccggcaccctgaaagtcgcaaccgaagatgattacgcgccttttaactttatgaataacggccaggcggatggcttcaacaaagatatgctcgatgaattacgcaaatacgcgaaattcaacgtcgaccagagcattttgccgtggaccggattactggcggcggtttctaccggccaatacgatatggccttaaccggcgcggtaattaccgacgaccgtctcaaggtctttgatttcacgccgccgtgggcgtcagcgcagcactattttgtcaaacgcgcgggcgataattcattgaacaccattgccgaactgagcgggaaaaaggtgggcgttcaggcgggcagcgcgctgctggcaaggctgccggaactgaaagcgatgctggagaaaaccggcggtaagctggggccggtggtggagtatccctcctacccggaagcctacgccgatctcgccaacaaacgcctggactacgtgattaacgtggttatctcggtcaacgacctggcgaaggccaagccgaaggtgttcgccaaaggtctggcggtatccggcccgggctatatggcctggccgatcccgaaaaactcgccgcagctgctggcctatatgaccaaatttatgaaccacatgaaggagaccggcaagctcgcggaactccagaaaaagtggtttggcgaaacctatgacgatcttccgaacgtgccaatcaccagcccggaacagttccataaattggccggtctgtaatgcgttctgcggcgggtaaccgccgcccgttgagtgaaggagggcttcatggatgcaatttcctggcagttactgattgaaggcgcatggacgaccctctggatttcggccatcgccattgcctttggggtggtgattggcctgctgattgcgctggtgcgcatgctgcgcattccggttatcgatcagctgctggtggtctatatcagcctcgcccgcgcgacgccgctggtcacgctggtgctgttcctgtttctttctctgccgaccgtcgggattaacctcgacaaaaacgtcgcggcgattgtggcgctgacgctcaatacctcggcctttaacgccgaaatatggcgcaacgcctttcgcacttttccccgcgaacagcgggaagcggcggagtcggtcgggatgcgccgctgggcctacttccgctacatcatgctgccgcagatgtggattgaaagcctgcccgcgctggttaacgagatgtcgttcctgattaagggcagtccggccattgcggtgattggcgtggtggatttgacgcgcgtcaccaaccggatttcttcggtcacctatgaaccgctttcgccgattctggcggcgggtctgctgtacgtggtgattattggcctgctgctgaaactgcagggaatggccgagcgtaaagcgaagcgtctggcacgataaatacgggaggtgctatgaatcagtgggccgttatctggtcggtgcgcgacagctttattgccggtttactcgccacccttgagctttttattaccgcggcaattgccggattaattatcggcattgtcctgtgctatttaaccgaatatcaaaagaaaacccttaaccggcttattattgcctttgtcagcttaatgcgggcgattccctttttgatcctcgcctatttgctctattacgggctgccgcaagtgggtattagtatggagccctggaccgccggtttaattgccttaattatctaccacggcgcctatttctttgagattttgcgcagccagcggcgggtattttccggtggctatatcgaggcggcggtcgcgcaggggttttcgcgctacaaaatattccgccgcattattctgcccaatattctctcttccgcgctcccgctgatggggaaccagctgattatctgcctgaaagataccgctttcctcagcattatcaccgtccaggagataaccgccgcggctaacagcgtgcaggccacctattttatcccgtttaacgcttttatcgtcgcgattgggctctactgggcgatcagcatcctgctggagctgctgattaaacgcctgagcgcctggggagtcagaagaggaatgagtcatgtctgatactactgctgtaagcgtcaaaaacgtctctaaacagtttgataacgtggaagttctgcgtgatatcaacctgacggtagaaaaggggaccgtggtgagcattctcggctcgtcggggtcgggtaaatcgacgctgctgcgctgcatgaactggctggaacagccggatcgcggcgagatccgcatcagcggccagcggctggggattgatgagcataatggccgcgcgatgtcccatcgccagctgtcgaaaatccgcgagcgggtaggcatggtgtttcagagctttaacctgtggccgcacctgacggtgcagcagaacgtcagcgaagcgctgctgcacgtgaaggggatgaagcgtgatgaagcgaaagctatcgccatgcagcagctggagaaagtggggatggcgcataaagccgacgtttacccgattacgctctccggcggacagaagcagcgggtggcgattgcccgttcgctggcgatgtcgccggaggtgattctgtttgatgagccgacgtcggcgctggaccccgagctggtcaacgaggtgctgggggtaatgaaggcgctggccgccgagggctacacgatggtggtggtgacccacgagatggactttgcgcgccaggtctcggatgaggtggtgtttcttgagaaggggttgttgattgagaaagcgccgccggagaagtttttcaccaacccggattccgagcgcgtcaggcagtttttgcagagcagccggtaagcatcagcggccgttctccccggtcgcgctgcgcttaccggggctacggggttccagccgtcagcggggagtagcccgggtaaggcgtttacgccgcgacccgggatttccgggctcggcgcctgagggtggcagattgggtagcccggacaggcgcgtcaagcgccgcccccgggacggtgtggtaggggttccgttcaccgctatttcgcagaaaatgtctcaccgtggtaggtgaacgggtaaagggggagaaaaccgtctccccctttacaatccccgcggtcccgcaaagaaatcggtgctgcgcactgcgctcacctcccggacctcagcctgcggtcggctcaactcgacatcactgtctcgattcgcctctgtccgccatccctggcggccagcccttgtcttcggtcctccggttcgccgatttcagcgggggccagggcatcgctgcataacacgttgtttcagagacatatccgtagctgcatgaaactctcccggaggcggcgcttgacgcgcctctccgctctatcaaaccttaatcccgatcgatggcgaacggctgccaggcctgacgcaccggcatcacctcgacccggttgatattcatatggtccggcagcgtggcgatgtagaacatctgttcggcaatatcccgcgcgctcagcggcgtggtaccgcgatacaggttgtccgacgccgcctggtcgcctttggtgcgcaccagggtaaattccgtttcggcaatacccggcgcgagatcggtcacgcgcaccccggtcccgagcagatcgcagcgcaggttatagctgaactgcttcacgaaagccttactggcgccgtagacgtggctgccggggtagggccactgcccggcgatagagccgatattgatgatgctcgcgcccgcgccgtggttaatcagcgtcggcagcagcgcgtgggtcacgttgaccagcccggtgacgttggtgtcgatcatcgttttccagtcgtccagatccactttctgcgcgggctgcggcgacagcgccagcccggcgttgttaatcagcgtcgtgatatcggcgaagcccgcgggcagcgccgccacggccgcggccaccgcatcgctatcgcgtacgtcgagttcgataatgtgcaccggcacctgcgaggcgagcttatcctgtagcgtcttcagccgcgcaaaacggcgtccgctcagcaccagcgaccagcccgcatcggcgaagacctgcgccgctgcttccccaaatcccgaggtcgccccggtaataaacaccactttgctcgttgccatttcattctcctgtgcaggttgtcgctcccactataaaaaccgcgcgcgtgcgggcacagggccagtcggcgcgcggcgatgtgacacggtgtcacatcattttcgcctgactggctctatccgtttctcccccgcacggccaatgatgaggccaacaacaacgacatgagagagggcagggtatgaagctggcactacagaacgaggtagcgataagcaatgatgaagttcggcagctggatcgcgcttatgtgtttcattcatggtcgatgcagggcaatttacatccgctggtgatcgccggggcaaaaggctgcgagctgtgggattacgaaggcaatacttacctggatttcagcagccagctggtcaacgtcaacattggctatcagcatcctcgcgtgctggcggcgatgaaagcccagctggaagagctggtgaccatcgcgcccgccaccgccaacctcgcccgcggcgaagcggcgaagcggattgtcgagctggcgccggaaggctttagcaaagtgttcttcaccaacgccggcgccgatgccaacgagaacgccatccgtatggcgcggctctataccgggcgcgataaagtgctctccgcctatcgctcctatcacggcaataccggcagcgcgattgccgccaccggcgactggcgccgcgtgccgaatgagtattcacgcggtcacgtgcacttctttaacccctatctctaccgcagcgaatttaacgccgcgacggaagaggaggagtgccagcgcgcgctggcccatctgcggcggatgatcgagtgcgaaggcccgaacgcgatagccgcgattctgctggagtcgattccgggcaccgccgggattcttgtcccgccggagggctatatgcagggcgtgcgggcgctggccgacgagtttggcattgtgctgatcctcgatgaagtgatggccggttttggtcgtaccgggagctggttcgccttcgagcaggatggcgtggtgccggatctggtgactttcgccaaaggggtgaacgccggctatgtcccggccggcggcgtgctgattagcgagccaatcgcccgctactttgatgaccatttctttgccggggggctgacctattccggccatccgctggcgatggcggcgattgtcgccaccattgacgcgatgaaggaagagaaggtggtggagaacgcggcgaccatcggcaacgaggtgctgcgtccggggctggaagcgctggcggagaagcacgcgattatcggcaacgtgcgcggccgcggtctgttccaggcgctggagctggtcagcagccgcgagcggaaaactccgctgaccgctgccgatatggcggccattaaaggcgcgttaaccgaagccggcctgctggcgtttgtggtggagaaccgcattcacgtggtgccgccgtgcaccatcagcgccgaacaggtggcaaaagggctggcgatttttgatgcggtattcgcccgcttcgcgagcctggctcagtaaggggatgatttcccgggtcgcggcgtaaatgccttacccgggcgaccttctcgcagatggcggcgaacccgtagccccgctaagcgtagcgcgagcgggggcgggttttcagcctatccgatgttcgccgttcaccagcgcttcgcggttaaagaagcgctgaatcacgccttccgccataaacgccgcccggtccgacatatgggcaatcacatcggcatcgtggctgaccagcagataggtcattccgtgctcctgctttagccgattgagcagattcagtatttccgcctgcaccgacatatccagcgccgacgttggctcatccagcagcagaatctttggccgcagcagcagcgcgcgagcaatcgccacccgctggcgctggccgccggaaagctggtgcggatagcggcgcgcggcgtcggcaggcagccccacctcttgcagggcggtggacacccgctgttcgatctcgccgatagcgtgaattttcagcggctccgccagcgtgcgccatagcgtatgattgggatgcagcgaggcgtacgggtcctgaaacaccatctgtacgttgcgccgcagctcgccctgaaaacgcgcgcccggcgtaatggccttatcgaacagttcaacgcggccgcgccagtcccgctgcagcccggctaatacccgcagaatcgttgattttccgcagccggatgcgccgatcaggctgaacgtttctcccgcgtcaacggcaaagctggcggcggacaccgcggttttttcgccaaaaataacctgtaaatccttgagattaacgaccaccatgcgccgcctccgtcaagttcagggttcggtcgagggtcggcagcatctgaccgtaagtttgcgcggccgggcgacaggtccagagcgtacgggtgtagggatgcgtcgccttcggcagatctcgcgccgccatctcatcgaccttttccccttgatacaggaccagcacccgctggcagtgctcggccaccagcggcaggtcgtggctaatcaacagcatcgccatccgccgctgttcgcactgctctaccagcagttcgaggatctgattacgcagccgggcatcgagggctgaagtgggctcatcggcgatcagcacctgcggattattgagcagcgcaagggcaatcatcacccgctggcccatcccgccggagagttcgcctggataacggttgagcaccggtaaatccagaccgacggcggcaacggcggctttgaccgcctccagccgcgcgcggcggctaaggcgctgatgcagagttaatgcctcttccagctgcgcctgaatgttttttaccggattgagcgcgtagcgcgggtcctgcagcaccatcgctatatcgttgccgcgtagctcgcgccagccgcgttcgcgaagggttaatgcgtcgcgccccagcacgttgagcgcctcggcgctgacgacgccgggccggcgtaccagccccatcagggcgcgggcggtcatggatttaccggagccggattcgccgaccagcgccagccgctcgttgccgagcgtgaagcttaaatggtccaccactctggcggtgggatagtcgatggtcagtccctgaacgatcaggcgaggatcagtcatgttgcggctccagaacgtcgcgcaggccatcgcccagcaggttaaacgccaggctggcgatcaggataacggcgccaggggcggcggcgatccaccactggtcgaaaataacctgcatgccgtcggcgatcatcgcgccccattccgccattggcgggcgggcgccgaggccgaggaagccgagaccggcagcggcgagaataatcccggctaaatccagcgccagccggacgatagctgagggcaggcagagcggcagaatatgacccatcagcagacgccagccgcgaatgcccatcatctccgccgccgccagatagtcgctgtggcgcaggcgctgaatttcgctgcgcgcctgacgggcgtaagcgggccaggtcgttagcgccagcgccagggcgccgttcaccaggcccgggccgagcatcgcgacaaacgcgaaggccagaatcagccgcggcatcgacattaccacgtcggtaaaacgcatcagcacgcgctccagccagccgccgtaatagccggacaggatccccaccagcagaccggcggggagcgtaatcgccgtcaccagcgcgaccagccccagcgccggacgggcgccgaaaatcagccttgagagaagatcgcggccgtagctgtcggtgccgagccagtgccgcgggcccggaccctgcagccgcgcggcggcgtcctgccagttcgggtcgagaggagccagccagggtgcaaagagcgcaatcagcaggagtaccgtaatgatgatcaggccgcaaaaggcggcgggagaacggcgcaggcggcgtaaaaaaaggtagccaggcatcagcgtatcctcggatcggtcagccgcaccagcaggtcggtgaggttattaatcagcacaaagctcgcgccgatcagcagcgtaccgcccataatcgccgtggtatcgccggcaaagagcgcggtggtcagatagcggccaattcccggccaggagaagacggtttcggtcaacaccgcgccttccagcatggaggtccaggcgagggcggtcaccgtcagcagggtgccgcggatattgggcaggacgtgacgcagcagaatcgtcatctcaccggcccctttggcgcgcgccagcaggatgtactctttgttcatttcgctcaggcaggcggaacgggtcaggcgggtgatgctcgccagagaataataggccagcagcagcaccggcagcagcaggtgcccggcggcgtttttaaccgcctctttatcacccgagagccaggtatcaatgagcgcaaagccggtgcgcggttcgacggtgtactgataaatatcgtccagccgccccggccccggcgtccactgcagtttggcgtaaaacagcgccagcatcagcagaccgagccagaaaatcggcaccgagttgccgagcagcgtaaaggtgcgcatcgccagatcccacggcgagccgacgtagcgggcgcagagaacgcctgcgataacgcccgacagcgcgccgataatcagcgccagcgtagccagttcgagggtggccgggaaagcggcaagcaggtcgtgcagcaccggctggccggttgagctggcgataccgagatcgccgtgggcgagattcaccagatagtgccagaactgcagcggcaacggctggtcaaggccgagctggtggcgtacctgatcataggtggactgactggcgtggtcgccgacgatttgcagcacccgatcaaccggcgacagcgccgagagcgcaaaggtcaccagcagcaggccgagcagcgtcagggccagcgtcagcagtccctgaaacagcgcgagcagggggcgttttgcgcgccgctctgctcgggggggtaacacagcagacatggttattccgttggtaaaaagtacagtgttatcagctggcgcgatctgttgttgtagcccggtcagcgcagcgccaccgggaaaacataaggtatcggggcctgcgttcccggaggcggcgcgttgcgcctgtccgggctacgtgatcgtacctgccccaggcgttatttggttacccggtcataccagaccatatcggcattgagaccctgctgataacccttcacgttatcgcgaaccacaatctgggttttaccctgatcgataaacacgtaaggcgaactgcgctgcagcgcctcctgcatgtttttatacagatccaggcgcttcgctgcgtccggctcggcgactgccgccagggtcgctttattcagctccgggatctgccagccgtttagcccggcgacggtactggatttaccgtcgttgtacgcaaaggcgctggcgttagagtgggcatcgaaatagtcagggatccacagccgaatcgccgcctgatgctgtttggcgcgcacgcgagcatagacctggctacccgcggccggcagcaaatccaccttcacgccgccctgggcgaagctcgcctgcatcgactgggcgatggtgataaacggcggcttgttttcgacgtcgagggtgaaatgcgcctctttgatgcccgctttagcgaggatgtctttggctttttgcgggttgaatgtaaacgggttattgtccagcgcgcccggcaggccgaccggcaggaagctctgatggacgaaatattgccccttcagcaaatctttcgtgatgccgttgtaatctaccagccagcgcgccgcttcccagaaggccgggtttttcagcagcgggttggcgctgttgccggtattaaagaccagatagttctgctcagcggaagggatgctgaggaccttgacgcccggtttaccctgtagagccgcaatctggtcggcgccgagatcgcgcgccacgtcggcatcaccctgctggatgagaagacgacgtgaggccgggtccggaacgttcttaataatgatgcttttcagcttcggcgcgccgccgggtgcgctgctgttggcctccagcacgatggcctgatgcggctgatagacccgcattttatacgcgccgctgcccgccgagtgcattttcagccagccgttaccgaagtcgttatctttggcgttcggggcgacctgtttctcatcgacgatagaggcgatcggcgtggagagaatattcagcgccaccgccgggctgacgtcggcggtccagcgtagctccagggtatggtcgtctaccttcttcagctggctggcgatgttgtccggctgccagccgaggacgttaagaataaacgctggcgatttgttcaggatgaccgcgcgggtgtacgagtaaatgacatcttccgggcgcagcgggttaccggaggcgaatttggcgtcgggctttagcttaatggtcagggttttcgccgccggatcggcctgccagctttcggccaggatcggggtgattttttcagggttatcgcggtccggctgcaccaggcgctgataaaggctcggtaccgtctggatgctggagagctcgttggcttccgccgggtcgaggctgacgatatcgtcgaggccctgcgcgaccaccagggtccccggcggcgtggcggcgtgaacggcggcggataacgcggcgagcaccagcagcggcagcagttttttagtcatatgcgatccctgaaaaaagttattgtgattattgatgtttcgctacgttaggccgcttaattacgggcgtaaagtcaaagatcggctaagtttatgcttaaaaagcataagcaagaccaaggggttatgacgatcgatcgtaccgggcatcttccggccattcgcctttcttgatataacaatttgataacactacgggagagataagcgtgccggaaattaatgaatttggtcagcaggtcaacgatcgcgtgccagggtggcagggcgcgggacttctgcgccgcacggcgttaaatggccgcttttgccggctggagccgctggataccgagcggcacgcggcggatctgtttgccgcctatgccctcggcgacgacagcgactggacctggcttgccagcacctgtccacagagcgtggagtcaacggcgaactggatcaccggtaaggttatggacgacgggctggtgccgtatgcggttatcgatttgcgcgccgagcgggccgtcgggctggtcagctatatggcgattgagcgggcgatgggcacggtggagatagggcacgtcacctggtcgcgggcgatgaaaaatacgccgctcgggaccgaggcggtgtggctgctgctgcaaaatggttttgctcacggctatcgtcggctggagtggaagtgcgattcgatgaatctcgcctcccgccgcgccgccgaccggctggggtttacctgggaggggcgtcttcgtcagaggatggtgcgcaaaggacgcacccgcgatagcgatatgctgtcgattatcgatagcgaatggcccgcgcgcgacgcggcgctgcgggcgtggctggcgccggagaactttgatgctgatggacggcagctaaagcggctggaagattttcgctagtttttcctcaccctaaccctctcccgcagggagaggggcgggggcttactcttaccggcgaaccggcgcgccgttcgccacgtaatacgccgcggtgctcttcggcagcggctgacggccgcgaatggcgtcagccattttttcgccaatcatgatggtggtcgcgttaaggttgccggtaataatctgcggcataatcgaggcgtcgaccacgcgcaggccttccagcccgtgaacccgaccttcgccatccaccaccgccatctcgtcgtagcccattttacaggtgccgcacggatggaaggcggtttccgcatgattgcgcacaaactcatccagctcggcatcgctctggcactccgcccccggactgatctcccggccgcgatagttatccagcgccggctgatgcatgatttcgcgggtaatgcgaatcgcgtcgcggaactcctgccagtcctgttcgctggacatatagttaaacagaatcgccggatgttcgtgcgggtcgcgcgacttcagacgcacgtggccgcggcttggggagcgcatggagccgacgtggcactggaatccgtgctctttcaccgcgtttgagccgttgtagttaatcgcgaccggcaggaagtggtactgaatattcggccacgcaaaggcttcccggctgcgaataaatccgcccgcttcaaactggttgctggcgccgatgccggtcccgtcgaacagccattcggcgccgattttcggctggttccaccactgcagcgccgggtaaagcgacaccggctctttacattcgtactgcagatacatctccagatgatcctgcaggttctcgccgacgccgggcagggcgtgaaccagcggaatatcgaactggcgcaacagttccgggctgccgacgccggagcgctgcaggatttgcggcgaagcgatggcgcccgcgcagagcagcacttctttactggcggtggcgtttgacggcgcggtgctgtcgccctccagccactcgacgccgacggcgcgtttgccggcaaaaataatgcgatcggtcagcgcatgggtgcgaatggtcagattgggacgcgcgcgcgcctggtcgagatagccgcgcgcggtactggcgcggcgtccctgcggcgtcacggtacgatccatggggccaaacccttcctgctggtagccgttaagatcgtcggtgcgcgggtagccggcctgtacgccggcttcaatcatcgcgtggaacagcggattgttgccctgctttggcgtggtgacgctgaccgggccgtcgccgccgtggtagtcgttggcgccaatatcgcgggtttccgctttgcggtagtagggcaggcagtcgaggtagctccagtgctcaagccccggcgccgaggcccagttatcgagatccatagcgttgccgcggatatagcacatgccgttgattaacgaggatccgccgaggcccttaccgcgtccgcactccatgcggcgattgttcatatgcggttcaggctcggtctcgtaggcccagttatagcgccgaccctgtagaggaaaggccagcgcggcgggcatctgggtgcggaagtcgaaacggtaatccgggccgcccgcttccagcagcaggacggtggtctggggatcttccgtcagtcgtgtagccagtacgttgccggcggaaccggcaccaataataatgtagtcaaactgcaaaaatgacctcctggttaaaatatggattgaaactgacccatctcaacctggatggattttatctgggtgtagctgtgcagcgtctgcacgccgttttcgcggccaataccggagtgcttgtagccgccgaccggcatctccgccggggattcaccccaggtgttgatccagcagatcccggcctccagccgatgaatcaggcgatgggcgcggtttaaatccggcgtgacgacgccggcggcgaggccgtattcggtggcgttggcgcggcgaaccgcttcttcctcatcgtcgtagctcagaatcgacatcaccgggccgaagatctcttcgcggacgatggtcatctggtcatcgcagtcggtaaacaccgtcggggcgacccacgcgccgcggtcgaagccttcgcctttcagcacctcgccgccgcagagcaggcgcgcgccttcttgcttgccgatcgcgatgtagcgcagcacgttatcgcggtgcgggaagctcaccagcggcccgaagttggtgctttcagcaaacggatcgccggggcggatacgcgccacgcgagcgaggattttctcttcaaacgccgccttcaggcgcgccggaacgaatacccgggtgccgttggtgcagacctgtcctgagctatagaagttagccatcatcgcgatgtcggcggcgaggtcgaggttggcgtcttcgcagacgatcagcggcgatttaccgcccagctccatggtgacttccttcagcgaggaggcggcggagttggccatcacttttttgccgctggcgacgccgccggtaaaggagattttggcgatgtccgggtgctcggtgagatactggccggtttcggcgcccgtgcccggcagcacgttaaatacccccgccggcagtcccgcctcgcggtaaatttccgccagcttcagggcggtgagcggggtgacttcactcggcttaaagatcatcgcgttaccggccgccagcgccggggctgatttccacaaggcgatctggatcgggtagttccaggcgccgatcccggcgacgacgcccagcggttcccggcgggtgtaggcgaatgaactatcgcgcagcgggatctggctcccttccagcgccgggatcaggcccgcgtagtactccagcacatcggcgccggtgacgatatcgacggcggcggtttcgctcagcggtttgccggtatcgagagtctccagacgcgccagttcatcgttgcgatcgcgcagaatatcgaccgctttacgcagaatgcgcgaacgttccatggcgctcatcgccgcccagattttttgccctttttgggcgctctttaccgcccggtcgacgtcttcgcggccggcggcctggacggtcgccagcacttccccgctggcggggttaatcgtctcgaaggttttaccgctggtggcggaaacataaccaccgtcgatgtaaagctgctgttcggccattcgggacatgggtcctccattagtgagaagtcggtggcagatatttgctgatgaagtgctcggcgagcgtttcggcgcgggctttatccagcggtttaccgctcagcgccgcgcgtagccacagcccgtcgatcagcgcggcgagaccgtatccggcctcctgcgcctcttcgcgcggcagggcgcgctgaaactcatagacgatattcgacagcagtcgccggctgctgacctgctgcaggcgatagagcatcggctgatgcatgctgctggcccaaaaggcgagccaggccttcattgccgcgctgcttatctggctgtcgtcgaagtttcccgccacgatggcgcgcaggcgttcctgcgggccggcgccgggcagggcgtgcagacggcccaacaccgcctggcgcagctggccggtgatatcgcgcatcgtcgcttccagcagcccgttcttatccttgaaatagtggctgatgatgccggttgatacgccagccctccgggcgatctgcgcgatggtggcatcgtgcattcccacttcattgatggcggccagggtggcgtcaatcagctgccgctgccgtatcggttgcatccccagtttgggcatttctcagactccattcatcagctttgtttatctattaaagcggtttttgattggacgttcaatataaaatgtgtcttaattgttgccgattttggttctaatagttgcaaaaacagtaaggagaatggatgacagacctttcgccgagcagagaaaaggacaaaatcaatccggtggttttttacacttccgccggactgattttgttgttttccctgatgactctcttcttcagcgatttttccgcggcctggattggccgtaccctgaactgggtttcccgcacctttggctggtactatttgctcgccgcgacgctctatatcgtgtttgtcgtgtgcatcgcctgctcgcgtttcggttcggtgaagctcgggccggaacattcgaagccggaatttagcgtgctcagctgggcggcaatgctgttcgccgccggtatcggtatcgacctgatgttcttctccgtcgccgaaccggtgacccagtatatgcagccaccggaaggggcggggcagaccatggaggcggcgcgccaggcgatggtgtggacgctgtttcactacgggctgaccggctggtcgatgtatgccctgatggggatggcgctgggatactttagctatcgttataatttacccctgaccatccgctccgcgctctatccgatcttcggcaaaaagattaatggcccaatcggccacagcgtggatatcgccgccgttatcggcaccatttttggtatcgccaccacgctcgggattggcgtggtgcagctaaactacggcctcaacgtgctgtttgatattccggactcgctgggcgcgaaagcggcgctgatcgtgctgtcggtcattatcgccaccatctccgtgacctccggggtggataaaggcattcgtattctttccgagcttaacgtggtgctggccctcgggctgatcctgtttgtcctgtttatgggcgacaccgagtttctgctcaacgcgctggtgctcaacgttggcgactatgtgaatcgttttatgggcatgaccctgaacagcttcgccttcgatcgtccggtagagtggatgaacaactggaccctgttcttctgggcgtggtgggtggcgtggtcgccgtttgtcggcctgttcctggcgcgtatttcacgtggacgcaccattcgtcagtttgtggtgggaacgctgattatcccgttcacctttaccctgctgtggctgtcagtgttcggcaatagcgcgctgtatgaaatcatccacggcaatgcggccttcgccgccgaggcggtcgcccacccggagcgcggcttctataacctgctggcgcagtatccggcgtttacctttagcgcttcggtggcgacgattaccggcctgctgttctatgtgacctccgcggattccggggcgctggtgctgggtaacttcacctcgaagctgaaggatatcaacagcgatgcgccaaactggctgcggatcttctggtcggtggttatcggcctgctgaccctcgggatgctgatgactaacggaatttccgccctgcagaacgcgacggtgattatggggctgccgtttagcttcgtgatcttcttcgtgatggcgggattgtacaagtcgctgaaggttgaggattatcgccgcgagagcgccaaccgcgacaccgctccgcgaccgctcggcgtgcaggatcgcctgagctggaagaagcgcctgtcgcggctgatgaactatcccggcacgcgctatacccgccagatgatggagacggtgtgcttcccggcgatggaagaggtggcgcaggagctgaagctgcgcggcgcttacgtcgagctgaaaagcctgccgccggaagagggagacagcctgggccatcttgacctgctggtgcatatgggcgacgagcagaactttgtttatcaggtctggccgcagcagtactccattcccggctttacctaccgggcgcgcagcgggaagtcgacctactatcgtctggagaccttcctgctggaagggagtcagggcaacgacctgatggactacagcaaagagcaggtcattaccgatattcttgaccagtacgagcgtcatttgaactttatccatctgcatcgcgaagcaccgggcaacagcgtgaccttccccggaatgtaggtcatctaaacgttttctgaaaaaggattgcggctggttaaatatacagtgaattgcgcagggaagcgtatgatggcggcgggtgcctgaggctttctgcgttcaggcttaggtgaggattcagaaagacgaagccccaggagatgttcccatcaacctgaggctcacgatccaaccctagcacgttggatagtagcctcttcttcgcatggaggcaacgagatgctgacaaaatacgccctggtggcaatcatcgtgctgtgtctgacagcgctgggattgacgttaatggtgcgcgattcgctgtgcgagctgagcatcaaagaacgtagtatggagttcaaggccgttctcgcttacgaaacgaagaagtagccggtatgcggggagctatccccgcttatccgcaggctgggtaaggaaccttaaggcaccttttttctgcttatgggggcaggatggacggcgagagaacatcgaccggttaaaacaatcgcgccgccaccctgcatactgcttcgctgacgttaacctcacccttaccggcatttttctaagctaaatccgttctaccagcagacaaaaccaccatcaaccaccaggtcaacgccggtgcagaacgaggcggcatcgctggagaggaacagcgccgggccggccatctcctcaaccttcgccatgcgctggatcggcgtctggctttcgaattcgcgggtctgatgaaccatctcagggcgggtgttcatcggcgtggcggtatagccggggctgatggagttgacccgaatccctttgccgatccactccatcgccaggcttttcgacaggtggataacgcccgctttagagcagttatagtgcgcctgatcgagaccgcggttaacgataatgccggacatcgaggcgatattaataatcgaaccgccgcccgtttcctgcatcagttcggcttccgctttgcaggagttccacacgccggtcaggttaatatcgataacccgctgccactgctcggtttccatctccagcgccggattggcgttggcaatcccggcggcgttgacggctatatcgaggcggccaaagcggcttttcgctaatgccacgccggcgcgtaggtcgctaagctggcgcacatcaccggtgtagaagcaggcctctccgccgatggcttcaatatttttgacggtttcggcgaggccgccgtcttcgcggagatcgaagcagacgacccgagcccccgcgctggcgagcccgtaagcaatcatctggccgatgccgctgcccgcgccggtgacaaaggccacgcggtcctgcaggttaaacagctgttgggcaaaatcttttgcgatcatagttattactctctaaaaaaatattctttagcatgcccggtgttggcgttcccggaggcggcgcgttgcgcctgtccgggctacggggcttgtgccgtcgggtagtcgggtagcccggacaggtgcgcagcaccgcctccgggacatgatttgtgtagcctgacctgaaaaatgccaggctggcggcattacgacataatcaagccgccatcgatattgatggtctgcccggtgaggtagcgcgcatcgtcggaggcgagaaacgccaccagcccggcaacgtcttccggtttgccggcgcgcttcatcggaatgccttcgacccactctgccatcagctcgcctttaccgtagcgcttctgctcggtgctgaggatttcgccccagacgcggtcgttgtaatcccacatctcgctttcgataatgcccggacagaaggcgttaaccgtgatattccacggcgccagctcgtgcgccaggctttgggtgatgccgatcacgcccattttgctggcggcatagtgcggggtgtagataaagccctgacgaccctggccggaagaggtgttgatcaggctgccgtggttctgcttgaccatatatttggcggcttcgcggcagcacagccagacgccggtggtgttaacggccagcactttttcaaagtcggccttcggcatgcgatcgtaatagtcgatggtgatcacgcctgcgttctggatagagacgtcgatggtgccgaaacgcgctgccgcctgctcgtacagcgactgcacctgcgcttcgtcggtcacatcaacctgtaacgacaggatgtcggcctggtagcgctggcggagggtttccgccgtttcgtggacgcgctcggcgttagagaccatcaccagattcgcgccgtcgcgcgcaaagcgctcggcaatacctgcaccaattccgcggcaggcgccggtgataacaaccgttttgttgtggaaatttctttgcatgtttttcatcccttattgaagccggacggcagagcatccggcggggtaataaagacgtgattagctggtggcgcctgccgccgccagcttctcctcatggcggcgcatcaggatgactttgttctgcagtttctgctggaactggtcgacgacgacggcggtgacgataaccacccccttaatgaccatctgccagaaatcgctgacccccatcatcaccatgccgtcggcgaggaagacgatgacgaacgcgccaatgattgacccggtcacccggccgcgaccgcccgccagcgcggttccgccgagcacggtggcgccaatggcgtccatttcgaacatattgccggtcatcgggtgcgcggtttgcagctgcgaagcgacgataaggccgacgaacgctgagcacaggccggagaaggcgtaaacgaagatttttgccttgacgataggcacgccggccaggcgtgcggcggattcgttaccgccgatagcgtagatataacggcccagcggggttttggtggtcagccagtagcccagcagcaggaagccgatcatcagccagattggcagatagatgcccaacagcgtcccggatcccagggtggagaaaccggtgttgcccagcgcttccatgccgttgaggttggggtaggtgctgccgtcgttgaacagcagcgccgagcctctggcgacatacatcatgcccagggtgcagataaagggcgcgacgccgaagcgggtgatgaccgcgccgttaacgaagccaaccagcacgccgaagagcgccacgcagaggatcacttccggtacgttgaagaagataacgctgccgttccataagggcaggccgttggttaacagcgctccggccaccatgccgcagatgccggccacggcgccgacggagaggtcgataccgcccgtcaggataaccagcgtcatgccgatggccagcaggccggtgatggccacgtgctgggtcataatcagcaggttagatgtggtcaggaaattcggtaccatcacgctgaagaacgcgataaccagcagcagagcgatgaacgttctggccttcagcaggtacatataaatcatatatttctggttcatgatgggttccagcctgattaatcttgaggtgttgaagccgcgattaatttttcgcgggtcaccgcatgacgcggtaaatcggcggtaatccgaccgtcggccatgaccaggatgcgatccgccagcgccatcacttcatccagctccgatgaagagaacatcactgccagaccctgctgggccattttgccgatcagatgataaacgtcggttttcgcgccgacgtcgataccgcgagtgggctcatcgagaaacaccacttccggcttcgtcatcaacgccttgccgagcaccaccttttgttggttgccgccgctgagcgaggtgacaggcagatcggggtcgctcaccttgattgccagttcgcgaatcatctctttgacgcaggcgatttctttctgcggattcagccatttccacgcccggcgaaatccctgcaggctgaaatcggataaggtcatattcgattgaatcgacatcatctgcaccacgccttcgccctgacggtcttcaggcaccagcgccagcccttttttcagccgcgcctggaacggggccttttcgatattttcgccgttgagatggacgttaccgctctggcagggcatcaggccgaccagacctttaaacagctccgtgcgtccggcgccgagcaggccgtagatgccgatcacttctcccttacttaaggtaaaggtcacatcgttgagcttatagccgccgctggggtgcagcgccgtcaggccttcaacggcaaggaccgcttcgcctttcggcgccggccggtagtcgaaatgttttttcttatcgccgaccatctgttcgataatccacggaatactggcgtcgctgacctcgcgctcgctgataaagcgcccgtcgcggaaaatagtgatgtggtcgccaatttccatcagctcttccagacggtgggaaatatagataatggtgacgccgcggcgtttaagctgttcgatcacgttaaacaggattttgacttccgactggctgagcgcggaagtgggttcatccataattaatacccgggtgtccttagaaagcgcgcgcgcaatttccaccagctgctgatggccaatgcctaattcgccaagctgggtgtagggatcgacattcagctccagtctttccagtaatgatttggctaactcatattgatatttttcgttaatcttccctttttgaaagaattcgttagccataaaaatattatccatgacgttcatattcgggaataaatttaattcctgaaaaatgatgctgattccctgcttttcagcctgatgcgtcgagctaagggtcaccggggcgccatcaagaataatttgaccggaagagggtgtttcaacgccagcaagcattttcatcatggtggatttacccgcaccattttcaccgatcagaacgtttactttatttcgatagacccggtaattcacgctatctaaggcgacaacgcccggataaacgcgagataattcgcgagtttcgataataacttcagagtcgactggttgggaattgacgagttcttgccgctgcatgttattgccctcccaaacgaacaattttggctggcgtaatatcaggcatggtctgcggaatatcccaggccgagaacacgccgtacacctgtaccgcttcgccggttttcacctgcgccgtctggatcatcttcaccgcatgttcgttaatcgcccggctatattcgccaaacagcacctgatcgttaaagtcctgatagctggcgccctgatagccgtcgcgtaataatgtgccgcgcagcgttgggccaatttgcaccaccacgttgccgccgctgatatcctgaatcgtcatttttccgctgcgcgaagcggaatcaattttgctgatattgccttcgactttgacgtaaaacacgcaggggttttcgtcctgagcgcgatagcctaaggttttgcaggcgctatcgatatctttcgccgcgcgcagggcggtcatcagctcggcaacggggcgggctttagccacaacctggggaaccagctggtcttgccatgtccgatcgatatccgccatatgcgggttgggcggagatttaagatcggccagctcctgctgagagacgatacgacagcccccgagcgcaagaataaccagcgtcagcgagatttttttatacataatacgctcctgtgcgccccggacggggcgcaacaacccgaaatcaggatttgatattgaagtcctgcactttgtctgcattgtcctgagtaatcagaatgccgcggaacatcacgcgctgcttggccggtttttcacctttttgcaggtagttatcgaggtcggtcactccctgagcggcgatggcctgcgcctgaagcatcacggtggcctgcagggtgccggcttttaccgcgtcgcgctcatcgttgctgccatcgataccgaccaccaccacatcgttacggttcgcggctttcagcgcggcaatggcgccgagggccacaggaccgttgccgcaaatcacgcctttcacgtcggggtgcgcctgcagaatactgtccataatgcgcttgccgtcgattaaggtgcctttcgcgtcctgcttagcgacgctgaccatatccgggtactggtcaatcacctggtggaaagatttagagcgggtcacgcagttattatccgcaaggttacaggtcagttcggcatatttgcctttctccgccattttctcgacaaatacgttggcgacttcagaaccggcctggaagttattatgggtaatttgctccagcgcgatatcatcgacaggaatttcgcggttaattaaaaccaccggaatacccgctttcttcgctttttcaatggcggcgacgctggcggtggagtcggcgttatccaggataatgccctgaacttttttaccgatggcggtatcgatcagctcattctgttttttgacatcttcaccatgcgacaaaatggtggtctggtagcccagctctttagctttctcgctggcgcccttggcttcagaggcgtaataggggttatccagcgagttaaccatgatcatgatggtgcctttttctgccgcctgggcagcgaaagaaaaggcggtcagggtagcagcggttaaaagcgttaaacgtaatttcatgacaattttctctcttggttgttattgtcgggtacggtgaaacaacgtaaggcctgtaaatcgagtttatgggccgggggtctccttttgttgatgattaagagcctgtccattagggctattttactggccattttgaaccagggcagtgctcaaaaccctcacgtactacgtgtacgctccggttcttccgcgctgtccgtgttcaaactgcctgcgccaataacgcctactgggataggctctaaggtgcgtcacgcgttcgattccctggtgggcgtcaggcggacgttgccggtttccataatgttctgttcaccgcatgtcgccactcctgccatcttttctgcaggcgctggtggcgggccatatcggggataaattcgctgtgttcggttaaaaacgcgttcaggtcggtcaccgatccgggattcagggctttgcgcgcgagcagggccgcgccaatcgccgacagctcggcaacgtcgctgcgcatcaccggacagccgagcaggtcagcctgatactgcattagccagtcgttcctggttgggccgccgtcgaccatcagcgccgttaagtggaagtcgtcctgctggcgcatcgctaccacgacatcggcgatttgataggtaatggattccagcgcggcgcgaatcagatgggcgcgcttgacgccgcggctcaggccacaaatcacgccgcgggcgctgtcatcccaccacggggcacccaggccggttaacgccggcacaaaatagacgcccagcgtggagtccacggaggcgggcagggtgttgagttcatgcgccagttcggcatcggaaagttcgctcaggccggtgctgtccgccatccacgccacggcatcgccggtatgcggaatattaccttcgagtccgtaggtgatgctgtcgccgtcgtgccaggcgatggtggtggccagcgcgccgatatcgcactgtgcggattttaccggcgccatcaccgatgaccccgtaccgtaggtggctttcacgcaaccgagttcgcccagcgcgtggccaaacagcgcggcgtgggaatccccgaccatcgccattacgggaataccgtcagggatagcgttcaacccccgggtatagccaaacaatccgctggagggcttgatctccggcagtgcggcgcgcgggatctggaacagcgccagcatgttgtcatcccactggccggtttgcaggttcagcagctgggtacgcgcggcattggagtaatcgcagtagaacgcctcgccctgggttaagttccacagcagccagctgtcgatagtgccgaggcagatttctccgcgctcagccagcgcgcgcccctcaggaagagattccagcagccagcgcattttcgaggccgaaaacagaggcgcaatcggcaggccggtcacggccttgatttgccgctctttgtcgctgtggcgcagttcatcgcaaaacgcggcgctgcggctgcactgccaggtgatcgcggcgttgattggcttaccgctctggcgataccagccgatcgcggtctcgcgctggttactgatggctaatgccgcgacgttttctgcgccaacgtgcgctaccgcttgcgcgataaccgccagcgaagcgtcaaccaggacttctcccgactgctcgacccagccttcacgcggcgtctggatcgccagcggctgagagaatttcaccacgacctggccgcggctatcgagtacgacggctttggcattggtggtgccttcgtccagcgcaatgatgaactctttacgtgttgcctgcattaggtagtctcctgagtcacacttcgtcctggcgcggagggggaagtcggcattcctctttatcgcattgcttcttagcaggccatgatgtgacaattcgttttcacttttttaatcactgaatatatattcgatggtgattatttatttgttaccttagccagaaacttcccgtcgggctacaggaaaagttatcaattgtgctggcaatcacacttatccgtttggtgaagcttctggatgtcgggggaaaagagcgcggttggctggttatatacgattgaaatataaaaatttattggcgaagcctttacgcctgaaggaaagcgtaaaggctgtgggaaagtgtttgagtgaggaaattacccggcgataagcagcctggccgttggataatcggtgatcagaacatcgatataaccgcctgaaagcgcgcctttgatagccgccaccttctcgctgccgccggcaagggccaccacgttagggcacttcttcactttctccagcgccatgccgatcacaggatcttcatcatcgcgtaacaccgccttgccgtttttatcgtagtagtgcaggcaaatgtcacccacggcgccgcgttccgccagcacctgcagcatatcttcgtgatagtagttaccggacgttttgagcagttgcgaaggttcaaggatgccaatcccgacgatggcgatatcgacttcgtcgaagcgcgcaatcacatcggcgacatctttgctggccacgaggcgatttttctcctccgtagaaccttcgatgctctgggaagggagcagccaggcttcacagttcagacgctgcgccagggtctgggtcaggatggtcgcctgcacgttaccgttaggacccacgccgccgagcagttgaatcacgccgttggccttcaggttttgcgcgtgaacctcatcaaccattgcgcggatagtcgaactccacgacgagacgccaatcagatctttcggccgcaatcgcgtttccagatagtgggccgcggcggatccaatggcgcgcttgatggtgtgatcgctggcgtcctcttcggtatccacgacgatggcctgtttaattccgtagcgatcctcgaggcctttttcaagattgaggaaaatattcgatggctgaacaacgctgattttgactacgccttctttttggcagcgggcgatcgctcgggagataaatgactgagaaagcgagagaagttgagcgatatcggactgctttcgtccttcaagatagtagagcgtggcaatcttaactaatagccgttgttcatcctgcttagccatatatttccccgaaaatcatttacgtgcagccattatgttagagctcattatcatacgcgaaaagaaaagacagttaagtgtgatggatatctaactttcgccaatcctcaaaatcagctatggacaaaaacagaacagtagccgcataattgaataaagagtcgttagtgaatatatattcatggcgatttcaggtcaactgaaaagtgcccgggtgacgtcacgcccggtggtaaggaggcagaatgttcctgagtatgatgcagcggcgtaagccttacgatgcgttgcctggggatgtctggtttttttagtccctgacggaataaatattccaagttgaaaataaattcagaggtattaaatgaatccctatagctatgatgtccaggcccttgagcgtaaagcccgcgccgtacgtcgccatatcgtcagattgaacgccaacagccctgcgggcgggcacaccggcgccgacctgtcgcaggttgaactgctcaccgcgctctatttccgtattctgaacgtcgcgccggagcgtcttgctgacgaccagcgcgatatctacatccagtcgaaaggccatgcggtgggctgctactactgcgtgctggccgaggcgggcttctttccggttgagtggctggaaacctatcagcatgcgaactcccatcttccgggtcacccggtgcgccagaaaacgccggggattgagcttaacaccggcgcgctgggccacggtttgcctgttgcggtggggctggcgctggctgcgaaaaaaagcaacagctcccgccgcatttttttaattaccggcgatggcgagctggcggaaggcagcaactgggaagcggcgctagccgcggcgcactacggccttgataatctgatcattattaatgacaagaacaatctccagctggcgggtccgacgcgcgaaatcatgaataccgatccgctggccgacaaatggaaggccttcgggatgacggtcaccgaatgccagggcaacgacatggcatcggtagtggcgaccctggaagggctgaagcaggaaggtaaaccgaacgtcgttatcgccaacaccacgaaaggtgccggtatttcctttatccaggggcgcccggagtggcaccaccgggtaccgaaaggcgaagaaattgcactggcactggaggaactgaaagatgagtaatgcagaacacctggcgagcgtgatggttcaggcctttattgatgcggtcgaccgcggcgtcgatctggtgccggtggtggctgactccacgtcaacggccaaaatcgcgccgtttattaaacagttccccgggcgtctggtgaacgtgggtatcgccgagcagagcatggtcgggacggcggcgggtctggcgctggggggcaaagtggcggtcacctgtaacgccgcgccgttcctgatttcccgcgccaatgagcagattaaagtcgacgtttgctataacaacaccaacgttaagctatttggccttaacgccggcgccagctacggcccgctggccagcacccatcacgcgattgacgatctggcggtgatgcgcggcttcggtaatatccagattttcgctccgtcttcgccacgcgaatgtcggcagattatcgattacgccatcggctatcaggggccggtctatattcgcctcgacggcaaggcgctgccggagctgcacgatgaaagctatcgctttgtgccgggagcggtcgttacgctgcgggaaggcgaggatatcgcgctggtggccaccggctcgacggtgcatgaaatcgtcgatgccgcgcagaggctggccgacgcggggattcaggccaaagtggtgagcgtgccgtccattcgcccttgcgataccgccgcgctgctggcggccctgaagccgtgcaaagcggtaataacggtggaggagcataacgtcaacggcggattggggagcctggtggcggaagtgctggccgaagccggcgcgggaatcccgctcaaacgtctggggatcccggatggcgagtatgcggcggcggcggaccgcggctggctgcgcaaacaccacggcttcgatgcagcttccgtcgccgagctggcgcagaaaatgcgctgattttacggcgccgtaaaccgataacccgcgcggtctgccgcgcgggttttgttttttacgctgcgcagagcgtgatgacgtagtcaccggccttaatccattgcagccgatactccccggcggagagccgaagaagcagatttccttcctttatatacgtcacctcaaaatcgctgaaacccacgcagttctgtatttcgggcgggctggccttaaatgcgctctcttttgccgaaaacgccagcgtcagcgccagcgccgacggcaggccgctggcgtccagcaggcttttttccgcgctattgacgatgctgctttccagctcggccgcgagggcgggagacaggatgcgttcaatatcaacgccgaccggcccggcggagacaaccgccagcgcgctgcgttcgcagtggctgatgctgccgtaccacggcgcgggccacaggggctggcgttggtcgccaatggcagggatctctgtctcaccgacctcccgcagcgcgtaaaccgcggcgatacgccccgcgaggtgctcggtctgccgcttgcgggcgcagtcgcttagccgggcatgatgaggcagccagaggagatcttcaggccgaaaggtcaatgggtcgaaatcgacacgctgcagcgagcgatcggcaagctgaataatagaacgttgggtttgcataggggggatgttaacagattctccccgccgccctctatggcaagagggcggggggaacggccagacaatcagaagtgggtattgacgcccagataccaggttctgccagattcgttataggtgttggcgcccgcgccagccatataagaaacatcggtcaggctaccggtggtttgcgcattccccgcgcgccagtggcgcttgtcgaagacgttatccacgccgccggtcaggctgacgtttttggtcacatcccaggtggcgctcaggccaacgatgctgtatgggctgacttcatccgtttcagaacccaccgcgggctcacctttgtagttatatttcttcggctgctgcttgccgtaccaggtgaaggtcgactgcaccgaaatatcctcctgaatctgccagctcagagtggagttcagggtatattccggaataatcgacagacgatcgccggtttccttgtttttactttgcagcatataagtgatgttattggtccagttcaccgtttcggtgaccggcacgttcagggtgccttccagaccttcaaccaccgctttaggcacgttttcccactgatagatatcagttttcactttaccgttcgtagtctgcgaaatcggcgcgtagccggcttcgattttatcgcggtagtcgttgcggaaccaggtcacccccgccagccagccgtcgcgtttaaactcaaggccaatctctttgttgatgctggtttcggctttcaggtcatcgttacccatcatgtagcaaccggtaccggtgccgctggcgtagcagccctggcctttgctatagagaatatagttcgggttggtttggtacaggctcggcgctttataggcgcgggcgatgcccattttcaacgtgaagtcatcccacagaccctgagacaggttgagcgacgggctccagttgttgccgacgatcgtgtgatgatcgaaacgcagcgccggcgtcagcatggtggtgtcggtcagctccacgttgtcttcggcaaacagggagaagatctcggccttcgagtatgggctacggccggtgctgtcatagccgtcgatatcgccgcccataaaggtctgggtatttgacgccaaatccttcatccgctgctgattccactcggagcccagcgtcaggttctggttaaacaccagatccagcgggatgttaacttcgctgtgcagcatcacgtcggccaggtcgatatcgctgaactggttgctgttgaagataccttccgtaccgcccgccagaccttcgcctttacgcgagttgcgggtacgttcgtactgggcccagttgctggtggtcacgccgttatcccagccgccgttccaggtgacggagtaagtctggcgatagaggcggttcgtctctttcccgtagttctcttttaccagatcgttggtattggtgttctgcgtatcgcccgcgtagaggttgccctgacggctgtagccggattcaaactccagcgactgcatcggggcgaaatcccagcgcacgacgccgttaatgttcttatttttaaccccttcacgcccggcaggcatggtattagcgtacgcgccggtacgctctgactgatgcccgtcgttgatatcccaggcatcggcctgcgttttatcgaggttgcccagcaggcggaagctgaaatcgccgcccagcgggccgctgaggctaaagttggtgcgtttggtcgagccttcttctttatgctccggggcgttcatgtaggtgttccatgaaccatgccattcgccgtcgcttttcttggtaatgatattgaccacgccgcccgccgcgccgttgccatagcgcgcggccgccgggccgcgaatgacttcaatacgttcgatcagctccggcggtacccatgaagtatcgccgcgggtatcgcgctcgccgcgccagcccagacgcacggagttgcggctggtcacgggcttgccgtcaatcaggatcagggtgttttccgggcccatgccgcgaatatcaatctggcgattgttgccgcgctggccgctggtggagttgccggtcaggttaacgccgggcatggtacggataatttccgacacgtcgcgcgctggcgggcgtttacgaatttcatctgcggtaatggttgaaacgccgggcgcctgcaggttctgctcggcggcggtgacgaccatggtttcatcagcggttgcggttttgctatcggaggcggtttccgccgcgctcagcggaaacgcagccccgtagattcccagattgaccagcaaggccagggatttgatcctgttattcattgtaattcctgctttttgtcgccaccttctccaaaagacccttcccagcgggaggagaggcggtatcaatgttgccggtagagggcaaagggcgctccgtcgcggactaaatgagccctctcagacatgtttaattttgaaagacgcgcttcccacagcgcgctaatacgctattgcaaatgaaaatagttatcaataatattatcaataaatattgcgtttattaatgcgtttgttgataaatgtcacgataaacatagggttgaaaaggaatgcataagacaggaagtgacgactggtggcagcatatctccggcccgcaaatcgaagccgttgacggcgcgtatcgggtaaccttctggtggcgcgatccggcgggcaacgaaacgtcttcggcaacccggcgggtatggatttatatcaccggcgtgactgaccatcataaaaatgccgtaccgcaaaccctgcggcgcattcccggtaccgatgcctggtgctggcaaaccacgctttctccgacctggcgcggcagctattgctttatcccttccgcccgcgacgacgacttttccccccagctttttaacggtgacggcccggaccgcgcgctgctgcgcgaaggctggcgcaggctgctgccgcaggcgattgccgacccgctcaatccgcaaagctggaagggcgggcgcggccacgcggtctccgcgctggagctgccgcacgcccccgaacagcccggctgggcgctgcgtgatgaaccttatcagccgccggtctgcattgaatggcagagccagcgactcggcaaccggcgacggatatgggtttacgccaccggcgacgcgcagccgcaggcgcgcccgctggcgatcctgctggatggccagttctgggccgaaagcatgccggtatgggcgccgctggcgggcttaacccgcgaaaaacggctcccgccggcggtttatctgctgattgacgcgattgataatccgcaccgggccgcggagcttccctgcaatgaggcgttctggctggcggttcaggaagaactgctgccaatggttcaccggctggcgcctttcagcgatcgcgccgatcgcacggtggtggcgggtcagagctttggcggcctggcttcgatgttcgccgcgctctactggccccagcgctttggctgcgtgctcagccagtccggctcttactggtggccgcatcgcggcggcgcgcagacgggcctgctgattgaccgcctgagccgcggcgaattacatccgcaagggctacgtatctggctggaagccggtatacgcgagccgatcatttttcgcgccaaccaggcgctgctcgcgcatctggaacagcagacgattttctggcgtcaggttgacggcgggcatgatgcgctgtgctggcgcggcgggctgacagccgggcttatccagctgtggcagcctttatgccgtgatgagtaacaacgcgcgctttacgaggaattagacatgcaattcagtaaccccttcgacaatccgcaagggcagttttacattctgcgcaatgaccagcagcagttcagcctgtggccgcaccactgcgccctgccggaaggctggtcggtggagtgcccgccgcagtcgttagcggcgtgcaatgactggctggcggcaaactggtctaccttgacccccgcccaccatgcatcctgaggagcccacgatgaccatacgtttaccgctggttgcggcgcagccggggatctggatggcggagcgcctctcgacgctgcccggcgcctggagcgtcgcccactatgtcgagctgcgcggtgatatcgacccgatactgctcggccgggccattgtcaccgggctgtcgcaggccgacaccctcagcatgcgtttttgcgaagataacggcgaagcctggcagtgggtcgatgaacatcgcgcgtttgccgaaccggattaccgggatctgcgtgccgcgagcgacccgcacgcggccgcgctggcgctgatgcaggccgacctcggacaaaacctgcgggtggacggcggcaatccgctggtttgccatcagctgctgcgggtgggcgataaccgctggtactggtatcagcgttaccaccatttgctggtcgatggcttcagcttcccggcgattacccgccagatcgccgcgatctaccgcacctggcagcgcggcgaagcgacgcctgattccccgtttacgccgtttgccgaggtggtggaagagtatcagcgctactacggcagcgacgcctggcagcgcgacaaacagttctggcaggcgcagcgtcaggcgctgccggcaccggcctcgctgtcggactcgccgctggcgggaagggcgaccagcagcgatatctggcgcatgaagctggaggtggatgccggggtctttagccggctggcggcaggcgcgccgcagtgccagcgcgccgatctggcgctggcgctgaccgccctgtggctgggacggctgtgcagccgaacggactacgccgcgggctttatttttatgcgccgcatgggctctgcggcgctcaccgctaccggccctgtgctcaacgttctgccgctggcggtcactattgatgccggggaaacgctgccggagctggccacgcgtcttgccgggcagctgaagaaaatgcgccgccatcagcgctatgacgccgaacagattgtgcgcgatagcggcagagcggcgggcgatgaaccgctgtttggcccggtgctcaatattaaagtcttcgactatcagctggatatcgacggcgtggaggctattacccacactctggccaccggcccggtcaatgacctggagctggcgctcttcccggatgaagccggggggctgtcgctggaggtgctggcgaataagcagcgatacgaggaacggacgctgcgtaaccatatctcccgactctccgcgctgctggcccagtttgccgataatccgaccctgcgctgcggtgaggcgaatatgctgtcggcggcggaaacggaacagctgcggcaggtcaacgcgaccgctgtcgacctgccgctcaccaccctgagcgcgctggtagcggagcaggcggcgaaaaccccgaatgcccctgcgctggcggacggccgctggcagtttagctaccgcgagatgcgccagcaggtggtggcgctggctgaacagcttcgcgcgcggggcgtcaagccgggcgatagcgtcgcggtcgcgctgccgcgttcggtattcctgacgctggcgctgcacggtattgttgaggccggcgccgcgtggctgccgctggataccggctatcccgacgatcgtctgcggatgatgctggaagacgcccggccgtcgctgctgattacctctgaagatcagcgggcgcgctttagcgatattcccggcctggaaagcctgtgctaccagcagccgctgacggcgtcggatgccgcgccgctggcgctctcacggccggagcatactgcctatatcatctttacctccggctctaccgggcgaccgaaaggggtgatggtcgggcaaaccgccatcgtcaaccgcctgctgtggatgcaggaccactatccgctccgcgctgacgacgtcgtggcgcagaaaacgccgtgcagctttgatgtgtcggtctgggagttctggtggccatttatcgccggcgcgcagctggtgatggccgagccggaagcccatcgcgatccgctggcgatgcagcggttctttgcccgctatggcgtcaccaccacccactttgtgccgtcgatgctggcggcgttcgtcgcctcgctggaggcggagaacgtcggcgcctgccaaaccctgcgccgggtattttgcagcggcgaagcgctgccgacggcgctgtgtcgggaatgggagcagctgaccggcgcgccgctgcataacctgtatggcccgacggaagcggcggtggacgtcagctggtatccggcctgcggtcccgaactggcggcggtaagcggcaccagcgtgccgattggctggccggtgtggaataccgggctgcgcattcttgatgccgccatgcgcccggtgccgccgggcgtggcgggggatctctacctgaccggcattcagctggcgcagggctatctggggcgccccgatttgactgccagccgctttattgccgacccttacgcgccgggcgagcgcatgtaccgcaccggggacgttgcccgctggctggataacggcgccgtcgagtatctcgggcgcagcgacgaccagctaaaaattcgcggccagcggattgagctgggcgagattgaccgcgcgatgtccgcgctgccggacgttgcgcaagcggtggctcacgcctgcgtcttcaatcaggcggcggcaaccggcggtgatgcccgtcagctggtgggctacctggtttctgactccggcctgccgctggacgccgccgcactcaaagagcggcttggcgaacagctgccgccgcatatggtgccggtggtgctgatacagctgccggcgctgccgctgagcgctaacggcaagctggatcgtaaagcgctgccgttacccacgttgagcggtgagcgcagtggccgtccgccggagcctggcgtggaaaccaccgtcgccacggcctttagccagctgctcggctgcgaggtgaacgatatcgacgccgatttcttcgccctcggcggccattcgttgctggcgatgcgccttgcggcgacgctcggccgcgagctggagcggcgggtgacgccggggcaggtgatggtcgcgtctaccgtcggcaagctgagcgcgctgctggcatcggacctcagcgatgagcaggcgcaacggctgggcttcgacgctctcctgccgctgcgcgagagcgacggcccgacgctattttgcttccatcctgcttccggttttgcctggcagttcagcgtgctggcgcgttatttaagcccgcgctggtcgatcgtcggcattcagtcgccgcgaccgcagggaccgatggccacggcggcggatctggatgcggtgtgtgaacatcatctccacactctgctgacgcagcagcctcacggcccctattatctgctgggctattcgctcggcggtaccctggcgcaggggattgccgcccggttacgccagcgcggcgaagcggtggccttcctcgggctgctcgatacctggccgccggagacgcagaactgggcggagaaagaggcgaacggtctggatcctgaggtgctggcggagatcgcccgtgaacgcgaggcgtttctggccgcccagcaggggcaggcttccggcgagctgttcagcgttatcgaaggcaactatgccgatgcggtgcgcctgctgaccaccgcgcacagcgcgaagtttgacggtaaggcgacgctgttcgtagcggagaaaacccgtcagccggggatggacccgcaggtggtgtgggggccgtgggtcggcgagctggaggtattcagccaggattgcgcccacgtggatattatctctccgcaggcctttgaagcgatcggcccggtgctcagggagatattaggttaggggcagatgaactcccgggttgcggctaacgccttacccgggctaccgtttgtgccagattgggtagcccggctaagcgcagcgcgagccgggaatctctacttgcgacccagcggcaccaccagcggcgtatgcgccaccggatcgtcaatgatcgtacagcgcaggccgtaaatttcctcgatcagcgccgcattgacaatctccttcggcgcgccctcggcgacgattttgccgtcgcgcagggcgatcaagtgggtcgcgtagcggcaggcctggttcagatcgtgcagcaccgccgccagggtatagcccttctcctgattcagctcgcttagcagctcaagcaggtcgatctgatggctgatatccagccaggtggtgggctcatcgagcagcataatcgccgtctcctgggccagcaccatggcgatccacgcccgctggcgctggccgccggagagcgtatcgacgctttgcagcgccaggtcggtaatgccggtggccttcatcgccctgctgaccgcctcttcatcctctttgcgccagcgggtaaacagcggctggtgcggatagcgcccgcgggccaccagctcctgaaccgtaatatctcccggcgtagtggcgttctgcgccagcaggccgatccgcttcgccacctctttactggcgtaacgctggatctgctcgccgtcgagatacacatgaccggatgtcggggtcatcaggcggctcagggtgcgcagcagcgtcgatttaccgcagccgttagggccaataatggcggtgaagtggccgtcgggaatggtgacgttcagcgattcggcgatggtttttttgccgtacgccagggtcagctggtcgccgcgcaaacgggaggttacagcggtcattttttgcgggactcctgaattaacaacccgataaggtagatgccgccaaggctgacggtcaccacgcccaccggtaactgatagggcataaacagacgctgcgcgcagtagtcagacagcgccagcagcagagcgccgcacagcgccgcctgggccagcccccagcgcgcggtgccgctgaggcggcgcgcgatatgcggcgccaccagggcgataaacgaaatcggcccggcgagcgcggtagcggcggcggtcagcaccaccccgaccagcatcagcagcagccgcgagcgctcaacccgcacgcccagggcgcaggcggtatcgtcacccatctccagcagccgcatgcgccgcgccagcagcgccccgcagaccagcattagcagaatcagcggcgccgagggccaggtttttccccaggtcaaaccgttaagcgaaccggcataccacagcccggcggagagggcggtttccagcgaagcgcgcagcagcagccaggtattgaatgccaccagcatagcgcgcacgccgatgccgataataatcaggcgaaaggtttcaatcccgttgcgccacgccagcagccagaccgccagcgcggtaaggatcccgccagccatggccgccatggcgatggccgccaggttctggccaaacatcaccatcgctaccagcacgccgctccaggctccggtgttaaaccccatcacgtccgggctccccagcgggttgcgggtcagcgactggaaaatcgcgccgctgacgccgagggcggcgccaatcagcagcgccatcagcacgcggggcaggcgccactcggtcaccaccatggcgacgttgcgcggcgcatcgccgagcagcgccgagataacctgctcaacgctcaatggcaccaggccggtgcccagcccccacagggagaccagcgcgctggcgaccagcagcagcaggcagctaaaaatcaggcgacgagaaggcgcaatcacatgccacctccgcgcggctggcggcgtaccagccagatcagcaccggcgcgccgataaaggcgctgaccaccgaaacccgcagttcgccgggcaccagcaggcgccccagcacgtcggcaaacagcagcagggcaggggtcgccagcagggtcaccggcagcgaccagcgatgatccgcgcccaccagccagcgggccatatgcggcatcatcaggccgataaaggcgatgggcccgaccaccgccgtggcgctgccgcacaggacggtaatcgccagcagaccaataagctgagtacgcgcgacccggctgccgagcgcggtggccgtatcgttgccgaggctcaggctgtttaaggcccggctcagcagcagcgtcaccaggccggcaatgagtaccgggatcagcacgattttcagtgtttgcagggtgcgcacatccagcgagcccgcctgccagaagcgcagctggtcgtagacgtcagggttaagcagggcgataccgctggaaagcccttccagcaccgccgccagggcgacccccgcgagggtcaggcgaaccgggctcagctggccgccgccctggctgccggtaaaggctaccagcagcgaggcgccgaacgcgccgcaaaaggccatcagcagctgctcctgcggcgaggagagaccaaacagcgccgcgcccagcacgatagcgaagctggcgccggagttgacgccgaggatccccgggtccgccagcgggttgcgggtcagcgtttgcatcagcgccccggccagacccagcgcggcgccggccagcagcccggcgagggttcgcggcagtcgtgcatcaaggacgatggtgcaatcggcgctctggcaggtgccggtgaaggcatcaatgacgacgctaaacggcaggggtttggcgccgaccagcaggctgagcgcaacggcgatgattaaaacgattaaaagacccggcacggcaaaggcgcgcgccgcggtcgtggaagacgacatggcttacatccctgacatgataatgatagtaattatcgttatcgattctatccggttatgttagcatgtgcacccataaaaatggtatggaaaataataacaaggcgctgtcatgaaccgacaatcctggctgctgaatctcagtttgctgaaaacccacccggcctttcgcgccgtctttatcgcccgctttatctcgatcctgtcgcttggcctgctgggcgtggcgatcccggtacaaatccagctgatgacccattccacctggcaagtggggctgtcggtgaccttaaccggcgggtcgatgtttgtcggtctgatgatcggcggcgtgcttgccgaccgctatgagcgtaaacgtctgatcctgctggcgcgcggcacctgcgggattggcttcgtcggcctgtgtctcaacgccatgctgccggagccgtcgctcatcgctatctatctgttggggatctgggacggcctgttcgcctcaatcggcgtgaccgcgctgctggcggcgactccggcgctggttggccgggaaaacctgatgcaggccggggcgatcaccatgctgacggtgcggctgggctcggtgatttcgccgatgatcggcggcctgctgctggcaaccggcggcgtggcctggaactacggcctggcggcggcaggtacctttattacgacgctgacgctgctgcgtttgccgcggctggcgccgccgccgcagccgcgcgagcatccgctaaaatcgctgtacgcgggactgaagtttctgtttaacagcccgcttatcggcggcattgcgctgcttggcggcctgctgaccatggccagcgcggtgcgcgtgctctatccggcgctggccgggagctggcagatgtcgacgtcgcagattggcctgctgtacgccgcgatccctctgggcgcggcgttcggggcgttgaccagcggacagctggcgcagacggcgaggcccggcgtgctgatgctggcgaccaccgttggctcttttgtggcgattgcgctgttcagcctgatgccggtgtgggcgctgggcgccctgtgcctggcgctgtttggctggctgagcgcgataagctcgctgctgcaatatacgctgattcagacgcaaaccccggaaaatatgcttgggcgtatcaacggactgtggaccgcgcagaacgtgaccggcgatgcgataggcgcggcgctgctcggcggcctgggcgcgattctgacgccggccgcttcggcgagcgccagcggctgggcgctggtcattgtgggcgtggtgctggtggggctgctacgcgagctgcgccgctttcagcgcccggagacggcgagcgaaaattaattgagccgggttttcccggaggcggcgcgctgcgcctgtcctggctaccggcccgcagacggcggtggactccaggcccgggtaagcgcagcgcaacccgggaagaagccgcaccgatgtatttatcccggcgcattcccggaggcggcgcgctgcgcctgtcctggctaccggcccgcagacggcggtggactcgtagcccgggtaagcgcagcgcaacccgggaagaagccgcaccgatgtatttatcccggcgcattcccgggttgcggcgtaaacgcctgacccgggctactggcccgcagacggcggtagactcgtagcccgggtaagcgcagcgcgagccgggaagaagccgcaccgatgcattcatcccggagcaacccaggctaccgacctgcagttgcccggtaggacccgtagcccgggtaagcgcagcgcaacccgggaagaagccgcatcgatgtatttatccccgtacattcccggttgcggcgtaaacgcctgacccgggctactagcccacagacggcggtggactcgtagcccgggtaagcgcagcgcgacccgggaagaagccgcaccgatgcattcatcccggagcaacccaggctaccgacctgcagttgcccggtagcgccaccgggaaaaccgaaaagagcgataataaaaagccccggatcgctccggggctggctatcactcgtcagtgactatttacgcttagtacgcgccgagatcgctccagacctggaactgaccgcagttcagatccggctggttgccctgagaccaccatttcacctggtagttatggcctttccagctcacgatttcaaagctgccccagttgctaccatagacggtgctggcattccacagcgggtaaggcgtggtttcgtcagaaggaacaacatcatcatctgccggttgaggcgtatcatcggtgcgatcctggtcgtcagccggctcgtcctcggtatcatcggtctgagtcgcggcgacgacggagagcacaaagcgctgctgcgttgacggttcaccccaggtatcgcgcacgaacagggtgaaggtatactcggtatcctcagccactttcggcacatcgaactcaatgaccgccgcggttttatcggcgacgttgatcgccgcgggcacgccccagctaaaggtcaactcgtcgttatcttcatcagaagatttttcgccggaaaggcgcacgcgggagccgcctaccaccatcagttcgatagcggctttcggcgcatggtttaccgacggttcaggctggacggtatcctcctcctcttcctccggttcagccggttcatccgccgggtcgacgttgatgccttcgaaatagaacggctccatatcgataacttcagacgccatttcatagcccagaccttcacgggcggcgttaaccagcacgccgttgtcctggtcgattgtccaggtgaacagcgcgcccaggccgaggctggcggcgtattcgcccttggctttcaccgtgcgcggcgtatccagggacatgaacagtttgctgtcagggttgtagaggtagtccgcgtcggcaaccttgtcggtgtagacgttgaagccgttacggcctttctggttttccagatccaggtagttataaatgatgtcgtaccattcggtggtacccgattcgaaggagccgacggtggtgccggtgcccgggctataggtgcctttcagcggggacagggattccagctccgcgttgcgcccgttacgggtataagcagcgtaaccaatgttgattcgctctgccgggaagccttcggacagcagatggccgacaacggtatccaccccccagccgccttcttccagcgccttcaggttggtgtggtgggtcacgctctccgcccacggggtaccgaagaagtcataggtcatgacgttgataccgtacaggcccgctttcagcagcgcattgacgttgggagtagccgagcgtcttgaccaccgcggagctggcaatggagattttgacgttgctcaggcctgcggcgtccagctgcttacgcagttcgccaatcagcagggcgtagttctcgccgtcttccgggccgtacgggttgccagcgccttcggcgttcggatattcccagtcaatgtccacttcgctgaacatcgggaactgcttgaacagttttaccacgcctttggcaaagaccttacgcgaggcgtcagacgcggcagtttcatggaaaccgttactcatactccagccgccgatgctcatggacagcaccaggtcgtggccctgctgcttcgctttagcctgcagatcgcgcaggccgccgagcaggcctttagtattactctgggtcacggtcttcggatcgacatcccagccgctgacggtatggccaacgttaacgtaagactggaagtcgccccacgggtcgaggaaggtgggctcgtacttcacttttccgcactgatcggcaccttcggcaaccacgtcgcgccacaggttgtccactttgtggaagccggtcacgccgacgaaaccgacgatgattttgtcgtaggcggtaggagaaacgttggtcaggtcgtagccgcgaccgcggttatcttttgaattatcgccctgcagacgaccatcatactgtgaccagtcggtgtagtagccgaagactttgggtttggtggtggaggctttgtatttgttatagaccggtttagcgacgcgagcggaggtatagctgtatgcgctcacttctgttgccgggttaaagccgtctgcggcgttgctggtttcggtcagcgtatcgcccttaatcaatttgctcgttgccacgttaatttccttctgtgttgaatgaccacctcaagcggtgtggggcagataatcgggcaacgcggcggccggggctaatcacaaattaacacctgaaacgatgatatttcggctgatgggcgatgagggtgatagggcgctaaacggtgaaaaagcctgttataacaacgcgatgatatatgaaatgaggcgcgatgagatcccggcgaccgacgccgggaagcgtggcttatgaaaagagggccgctaagcgctgcagcaccagcacggcgctgtagtaatccaggcggaaggtttccgtccccagcggataaacgcgtttgccttcaacggcgggcagatgcgccagcagcgggttggcgttaatcgcgtcggcatccttttggtcgccggcaaacaggaacaggctctggccgttaagtccggcggctaagttttccccgcccagctgcacgatatcatgacgttttccctggctctggctggcatgcagcccgccgggcaggtcggcgagggtaaagcccagctgctcgagcagctgtccctgagcggattctttggtccagatattggcgctatgggccgcggcggtgtagaccagcgcggtgaccggctgcggcggcagcttcattttctctttcagcgccgccagctttttatcaaactccgcgattctctccgccgcctgtttttcgtggccggtaatctcccccagttggatcagcagggcctgccagcttttatcatcgtagttaatgataagcgtcggggcgatggtggaaagctggtcgtagagcatcatcgccgaatcgccgccggtggcgctaatcagaatgagatccggcatttgcgccgcgacggcctcagcgctcggttcgccaatatagaggcgcgacagcttgcgcgctttcgccacatcgctccactggcgtaaaaatccctgaccgtcggcgacgcggttattgggcgtcgtggccccgctggccaccaccggcgcgtcaatcgccagcagcgagccggtcagcgtcacgctggtggaaacaatgcgcagcggctggctttccagcgtatggggtccccggctgtcggttatctgacgcggccagtctgtcgccagcgctgagctaattccgaaaatcgccaggccgctggcgaggagggtacggcggcaaaaggtggagaaattcacgtattcgcatcctggttaagtagtgataaatgcttctcattttcagctgtgagcggcgtcgatgcaagcttaagtcgcacaacatgctacctgtacggttgacatagcgcgcaataccttttaggttacccaaccaaaatataaatgataattattcgtaatatctttatcgtttttggaggatgatatggaaacgtctttggctgaggaagtacgggagaaaaaaatgactctgccgccggaaagcttcttctttatgtcgccgtaccgcagcttcaccaccgctggctgctttagtcggttttctcatcctgccgccgatggcgaaaatctggacggggaattccagcgcaaaatggctgccgcctttgcagcggcgcgggctgccgggatcgctaagccgataatggtcggcgccattccgtttgataccagcgagccgtccgagctgtttatacccacaagctgggaaaccttctcccgaccagaaaagcagcactccgcgcgctatgcgtccgggcagcagccgatggacgtggtgcagcgccgggagatccctgaacaggacaccttcatggcgatggtggcgcgcgcggcggccctcaccgcgacgccggaagtggacaaagtggtcctctcgcgcctgattgatatcaccacccgcgaacgggttgatagcggggcgctgctcgagcgcctgatcgcccagaacccggccagctataacttccacgtgccgctctcggacggcggcgtgctgctgggcgccagcccggagttgctgctgcgtaaagaaggcgcgcatttcagctctctgccgctggccggttcggcccgtcgccagccggacgatgtgctggaccgcgaagcggggcacaggctgctggcatcggaaaaagaccgccacgaacatgagctggtgacccaggcgatgaaggccgtattagcgccgcgcagcagcgaactctccctgccggactctccgcagctgatcaccacgccgaccctgtggcatctggcgacgcagattcagggcaccgcgctggcaaatgagaacgccatgtcgctggcctgcctgctgcacccgacgccggcgctgagcggcttcccgcatcaggcggcgaaacgcctgattaacgaactggagccgttcgaccgtcagctgttcggcggcattgtcggctggtgcgatgatgaaggcaacggcgagtgggtggtgaccatccgctgcgcgcgcctgcagcagcgcaccctgcggctatttgctggcgcaggtatcgtcccggcctcttcgccgctaggcgagtggcgcgaaaccggcgtcaaactgaccaccatgctgaacgtattcggcttgcaataagggactatgatgatcgaatttacccgctggccagaagagtttgcggcccgctatcggcaaaaaggttactggcaggatctgccgctaacctatctgattacccgtcatgcggaaaacgacgctcccgcgattatcgacggcgacaaaagctacagctaccgtgaattcaaccgcctggtggataacctcgcctcctcgctgcagcgtcagggcctgaagcgcggcgaaacggcgctggtgcagctgggcaacgttgcggaattttatatcacctttttcgcgctgctgcggatcggcgttgcgccggtcaacgcgctgttcagccaccagcgtagcgagctgaacgcctacgccgcgcagattgaacccgctttgctgattgccgaccgcgaacacgcgctgtttgccgatgatgattttcttaacgcttttgtcgcccagcatgcgtcggtacgcgtggccctgctgctgaacgacggcggcgaacgcagcctggcggcggccatcgcccagcctgacgataatttcgtcgcgcatccgacgcccgctgacgaagtggcttttttccagctctccggcggcagcaccggtacgccgaagctcattccgcgtactcataacgactacgaatacagcattcgccgcagcaatcagctgtgcggcgtaagcgccgaaacgcgctatctgaacgcgcttcccgccgcccacaactacgcgatgagctcgccgggttcactcggcgtcttcctcgccggcggcgtggtggtgctggcgcacgacccgagcgccaccctctgcttcccgctgatcgaaaagcaccagattaacctgacctcgctggttccgccggcggtaagcctgtggttacaggagatccatgagtccggcagcaatgcccgtctgcagtcgctgcggctgctgcaggtaggtggggcgcgcctgtccgcgaccctcgccgcgcgtattccggcggaaatcggctgtcagcttcagcaggtcttcggcatggcggaggggctggtgaactatacccgcctcaacgacagccccgagcgcattatcaatacccagggctgcccgatgtgtcctgatgacgaagtgtgggtggccgatgcgcagggtaatccgctgccgcgcggcgaagtcgggcgcctgatgacccgtggcccttataccttccgcgggtactacaagagcccgcagcataatgccgaggcctttgatgccgatggtttctactgctctggcgatctgatctcgatcgatgaagatggctatatcaccgtgcaggggcgggaaaaagatcagatcaaccgcggcggcgagaagatcgcggcggaagagatcgaaaacctgctgctgcgccatccggcggtgatccacgtcgcgctggtcagcatggaagatagcctgctgggggaaaagagctgcgcatatctggtggtaaaagagcctctgcgcgcggtggcggtacgccgcttcctgcgggaacaaggggtcgcagaatttaaactgccggaccgcgtggagtgcgttgatgcgctgccgctgacgccggtgggcaaagtcgataaaaaacaattacgtcagtggctggctgaacgcaagctgggctgaaggagaagacagaatggcaatcccaaaattacaggcttacgcgctgccggaagccagcgatatcccggcgaacaaagtgaactgggcatttgagccgtcccgtgccgcgctgttgatccacgatatgcaggagtatttccttaacttctggggcgaaaacagcgcgatgatggagaaagtggtggccaacatcgccgccctgcgcgagttctgcaaacagaaccatattccggttttttacaccgcccagccgaaagagcagagcgatgaagaccgcgcgctgctgaacgacatgtgggggcctggcctgacccgttcgccggagcagcagcaggtgattgccgcgcttgcgccggacgacaacgataccgtgctggtgaagtggcgctacagcgcgtttcatcgctcgccgctggaggagatgctgaaagacgcggggcgcgatcagctaatcatcaccggcgtatatgcccatatcggctgcatgaccactgcgaccgatgcgtttatgcgcgatattaagccgttcttcgttgccgacgcgctggccgatttcagccgcgaggagcacctgatggcgctcaactacgtggcgggtcgctccggtcgagtggtgatgaccgaagagctgctgccgctgccggcatcgaaagcggcgctgcgggcgctggtgctgccgctgctggatgaatccgacgaaccgatggatgacgaaaacctgatcgactacggcctggattcggtacgcatgatggcgctcgccgcccgctggcgtaaagtgcacggcgatatcgacttcgtggtgctggcgaaaaatccgaccattgatgcctggtgggcgctgctttcccgcgaggtgaaataatgaacgggctcgattttcacggccggaccgtgtggatcaccggcgcgggcaaggggatcggctacgccaccgccctggcgttcgttgaggccggcgcgcaggtaaccgggtttgatttggcgttcgacggcgaaagctacccgttcgccaccgagacgctggacgttgccgacgcgcagcaggtggcgcagacgtgcggccgcctgctggcagggatcgcgcggctggatgtgctggtcaatgccgccggtattttgcggatgggggcgaccgatgcgctgagccaggaagattggcagcagacctttgccgttaacgttggcggggcgtttaacctgttccagcagacgatggggcagttccgccgccaaaaaggcggggcgattgtgaccgtggcgtccgacgctgcgcatacgccgcgcattggcatgagcgcctacggcgcgtcaaaggcggcgctgaagagcctggcgctgaccgtcgggctggagctggcgggcagcggcgtacgctgtaatctggtttctcctggctctaccgataccgatatgcagcggacgctgtgggtgagcgatgacgctgagcagcagcgcattcgcggcttcggcgagcagtttaagttgggcattccgctgggcaaaatcgcccgcccgcaggagattgccaataccattctgttcctcgcctccgaccacgccagccatatcacgctgcaggatatcgtggtggacggcggctcgacgctgggggcataaatggcctggaaacgtcagctgacgctggatgaactcaacgcgaccagcgtcaatacgatggtcgcgcatctgggcatcgtttatacccggcttgaggagggcgtgctggaagcggaaatgccggtcgacgcgcgaacccatcagccgttcgggctgctgcacggcggcgcctccgcggcgctggcggaaaccctgggctcgatggccgggtggctgatgaccgaagagggacagtgcgtagtggggaccgagctcaacgccacccatcaccgggcggtctccagcggcaaagtccgcggcgaatgccgggcgctgcacctggggcgtcagggccagagctgggaaattgcggtgttcgacgagcggggacgacgctgctgcacctgccgtctgggcacggcggtcctcggctgaggcatagcctgttcccgggtcgcgctgcgcttacccgggctacgggtaacgcgccgtctgtggttccggccaactcaccgtcgtctgcggtgtgcttccccggtggcgctgcgcttacccgggctacgggttcatcatcgtctgcgggccggtagcccgggtaaggcgtttacgccgcaacccggggatacgccgggatgaatgcatcggtgcggcttcttcctgggtcgcgctgcgcttacccgggctacgggttcatcatcgtctgcggaccggtagcccggacaggcgcgtcaagcgccgcctccggggaagcaggatgcgatgcagtgagagattatccctccccgttttcatccattttcctgccagaagtgatctcgcttgcaatgtgagataaatccttgccgtcaggcgacatctgcaacgtttcaaagttgttaaaacttccattgtgttctagaaacaacttgtaacatcctgattaccctacctgtggaacacaatgatgaataattcagggaaatacctcatctggacactgctctccgttatcggagcctttgccctgggctatatcgcgctaaaccggggtgaacagattaacgcgctgtggattgtcgtcgcggcagtctgcgtctatctgatcgcctatcgcttttacggcctgtatatcgctaaaaacgtgctggctgtcgacccgacgcgcatgactccggcggtgcgtcacaacgacggcctcgactacgttccaaccgacaagaaagtgctgttcggtcaccattttgcggccattgccggcgcggggccgctggttggtccggtgctggcggcgcagatgggctatctgccgggaatgatctggatcctcgcgggcgtggtgctggccggagcggtacaggactttatggtgctgttcgtctccacccgtcgcgacggacgttcgctcggcgagctggtgaaagaggagatgggcccgaccgccggggtactggcgctggtggcctgctttatgatcatggtgattatcctcgcggtactggcgatgatcgtggtgaaagcgctgacccacagcccgtggggcacttacaccgtggcctttaccatcccgctggcgattttcatggggatctatattcgctatctgcgccccgggcgcattggcgaggtgtcggtgattggcctggtgatgctggtgttcgccatcatttccggcggctgggtggcggaaagcccgacctgggcgccgtggtttgactacaccggcgtacagctcacctggattctggtgggctacgggtttatcgccgcggtgctgccggtctggctgctgctggcgcctcgcgactacctctccaccttcctgaaaatcggcaccattgtcggtctggcgattggtattctgattatgcgcccgacgctgacgatgccggcgctgaccaaatttatcgatggcaccgggccagtatggagcggcagcctgttcccgttcctgtttatcaccatcgcctgcggcgcggtttccggcttccatgccctgattgcctccggcacgacgccgaagatgctggctaatgaaggccaggcctgctttatcggctacggcggcatgctgatggagtccttcgtggcgattatggcgctggtggcggcctgtattatcgacccgggcgtctacttcgcgatgaacagcccaatggcggtgctggccccggcgggcgtgaccgatgtggtggcgtcggcggcgcaggtggtgagcagctggggctttaccgtaaccccggatacgcttaatcagattgcgaccgaagtgggggaacagtcgattatctcccgtgcgggcggcgcgccgacgctggcggtgggcatggcctatattctgcacggttcgctgggcggcctgatggacgtctccttctggtatcacttcgcgattctgttcgaggcgctgtttatcctgaccgcggtggatgccggcacgcgcgcggcgcgctttatgctgcaggatctgctcggggtgattagcccgggcctgaagcaaaccagctcgctgccggcgaaccttctcgccacggcgctgtgcgtgctggcgtggggctacttcctgcatcagggcgtggttgacccgcttggcggcatcaacacgctgtggccgctgtttggtattgccaaccagatgctggcggggatggcgctgatgctctgcgcggtggtactgtttaagatgaagcgccagcgctatgcctgggttgcgctgctgccgacctcctggctgctgatctgtaccctgaccgcgggctggcagaagtcgttcagcaccgataccaaagtgggcttcctggcgattgccaacaagttccaggcgatgattgacagcggcaatattccgccgcagtacaccgagtcgcagctggcgcagctggtatttaacaaccgtctggatgccgggctgaccatcttctttatggtggtggtggtcgtgctggcgctgttctcgattaagaccgcgctggcggcgctgaaagaggacaaaccgacggcgaaagagaccccttaccaggcgatgcctgctgatgctgatagcctggtgacccaggcgaaacgcgcccactaagccatgacgttatcgccctcctttgcgagaaggggggcgatgatgggagttgaaaatgtttgataccctttcgaaagccggaaaatatttaggccaggcggcgaaaatgatgatcggcgtcccggattacgacaactacgtggagcacatccgcgcgacccatccggaacaaacgccgatgacctatgaagaatttttccgcgaacgtcaggacgcgcgctacggcggtaaaggcggcgcgaagtgctgttaaccctctttcggcagatacaggctgatctgctcctgggtgcagccgtatattgccgccagcttttcgcgggtgcgcttttgcgggcgggaatcgatagcttctagctgggataccgccgactggctaatcccgagcttattggccacctcctgctgcgacaggccgcgcaaaatgcgccaggccgcctgcaggctgactttctctttatccatgatgtcgcagacgtcacccggcagcatcacgttgtcgtagatatcgtgttctaccggaatatcttcaagatcggcttccgtttcatcatccagctcggctagctgcaaacacatctggaagtattcgtcgtaggggatcaccgcgtactgcgctttcccttcatcatccttaattatctgaacagccatatggcatattctcctcatgcaaataggttgttgaggttctgcgcttaacggacacgataaacaggtcgctcagcgtcagcccctgacatgtgaaaatgaaccgataatcccctacccgaagacggtaatgattctctggtttagataactttctgacatcgggccgaggagccgtacggtcacctaaatcagctagcctgcttttgattctctgctgatagcgataatcgatatttgccagttccttttttgccacttttgaccagatgagcatgctatgtacctccactgtacacctcagttgaacataagaaaataataagtttataagataagtttgttattttcttatgagggtaccctaacgcagaatcgtcttctggcgaaggcagaaacatcggctttgcgaggcggctcgaaagcgcctccgccgggcggcagaggcgaataaaacgggggattaaccggcgaaacgttcgaccttctcaaacgccgcgcgcagggtttcagcgttcagttcaaccggcagaaaatggatggactccaccgggcgcagggtatgggcaatcaccttatccagctgttcgcggttgttgatgtccacctccagcgccgccagcgtagtcggcagattaaagcgccggtacgcctgcaccagctgcgccagcacgtcgtcctggccgagcagggcgctctggaccagaatgccgtaggcgactttggtcccgtgaagatacttctcggtctgcggcagtaccgtcagcccgttgtgcaccgcgtgggcggcggcgacgcgggtatagcgctcgcccagcccgccgaccataccgccgccggcgataaccgcatccaccacgtcgcgaaacgcctgggtcagctcgccgcgctgctggtcggccagcgcggtttcgctgctttccagcagaacatcgcggatcgccagcgcgccgttgatacccaggcgcacggtgagcggcagcgtctccggctgcggagccagcaccaccgcttcataccatttcgccagcgtatcgccgatgcccgccagcagatattccgccggcgcgttaagaataatgtgcggctccaccagcaccagaaagttggcgtcgtcgaagatttcaaactgcagcgcctgaccggcatcgttataccacaccgacagcggcgtccacgccgcgcaggtggcggcgatggtggggatggccaccaccggcaggccgaggcgacgggccagcgccttcgcggtatcgagcagcgcgccgccgcccacgccaatcaccaccgaccgatcgtcgccggatgcgcgggccagctcgctgacgtcgctttcgctgcagtggcctttaaataatatttttttggcgccaggcgcgttaaacgctgccggcaggaaagcctgcgcgcccgcgatagcccgctcgccgtaaacccacaccgcgcgtgaaagctgttcttcgctgtaaaaatcctgcagccgggcaaggctgccgggatgggaatagtagttggcggggccggggaccacgcggatatcgctgtgactcatcaatgctgtccttgtgctgtttcgctaacctgatgttatgtctggacatccggatggctaatattatttcgctttatcttatgccttttatgcatttgtcagtcaaggagagctatgaaaaattcgttaaatcagaacattaatcgacagggtgcaggggatgaccggcaatcgccttgagatgcaaaatattagcctggccttttccggctttcgggcgctcagcaacgtggctttcaccctgacggggggatcggtgcatgcgctgaccggcgccaacggcgcgggtaagtccacgctcatggcggtgctgtgcggcacgcacgcccattacgaaggcgaggtggtgattaacaaccagtcggtaagtattcgctcgccgcgcgatgccaaacagctggggatccatctggtgcagcaggaggttgacgtggcgctggtcccgggcctgagcatcgcggaaaacatcatgctcgacaggctggcggagccggggatcgccttccgctgggggcggctgcgccagctggcgcgcgaggcgctggctcagcttgacgtcagcctcgacgtacgccgctccatcgacagctgtacgctggcggaaaaacagcaaatcctgctggcccgcgcgctgtcgcatcactgccgctttcttatcctcgatgaaccgaccgcgccgctggaccaaaacgaaagcgagcgcctgtttgcggtggttcgccgtctgcagcggcagggcattggtatcgtgtttatctcgcaccgcattcatgaattaaaagcggtctgcgacaccctgacggtgctgcgcgacggacggctgattgagagcgggccgatggccgatctgagcggcgagcagatcgtcgagaagatgctcgggcatgagctgagcgatatctttccgccgaagcggccgccgcatagcgatgaggtgctgctacaggttgaagggctgcacgacgaagggctgctgcaggatatctcgttgcgtctgcgcaagggggagattctggggatcgccgggctggcgggcgccgggaaaaccgagctgtgcaaggcgctgtttggcgccagcaaaagccgtttgacccgcggcgaactgaacagccagccgtggcgaccgcgcgacccggcggactcggtggcgcgcggtctggcgctggtgccggaagagcggcgcaaagagggcatttttatcgaagagccggtggcgatgaacctggcggtcagcgccgatagcagcttctcccgctggagcctgtttggccatcgtcaggcctggcgctgggcggaagaggtgatcgcccgggtgggcattcggacatcgggtccggcgcaaaccctgcgccgtctctccggcggcaatcagcaaaaagtggcgataggcaaatggctgcgcggcaacgccaacgtcctgattttcgatgagccgaccaaaggggtcgacgtcaaagccaaaacggatttattcaacgcgatcgacggcctggcgcgggaaggcaaaggggtgatttacgcctcgggcgagttcgccgaactggtcggcctgtgcgatcgcatctgcgtgctgtgggacgggcgcatcgtggcggaaattccgggcgcagaggcccgggaagagaacattctttattactccaccggaggagcagcagcgtgagtaaggccctggcagttaacgcgacggtatcgggccgtcagcgatttttcgattttctctacaaatggggcatgttgctgaccgtcgtcctgctgatcgccgtttttggcctggcgtcggacaacttcctcgacccgtttaacatcatcaacatcctgcgttccatcgccatcgtgacggtgatcgccatcggcgtatcgatatcgctgaccatcggcggtttcgatttatccgtgggctccaccgcctcgctggccaatgcgctggtgatttcgctgtttgtctggcacggcttcggcaccaccgaggcgatccttatcaccctcgcgctctgtaccttagtggggctgttcaacgcgtttctgatcgtgatcctgcgtattcccgacatgctggcgacgcttgccagcctgttcgtgattcagggcgtggcgatgacctacagctacggcgggtcgatcaccgaaaacatggtgctgccgagcggcgatatggcggaaggcgtgattccggcggcgttcggttcgctggggcaggtgccaacgatagtgatcattatgctggtggtgaccgttatcgctcagctggcgctctcttttaccacccacggacggcggatgtacgccatcggcggcaacccggaagcggcgcgcctctccggcctgcgcattacccgttacaaagtggcggcgtacgtcatcgcctctctgctggcggggctcggcggcattctgctggcgtcgcgcatcggctcatcgcaggtgaacgccggcggcggctacctgatggatgcggtggcggcggcgtggattggcttctcgctggccggttccggtaagccgaacgcgctcggtacgctggtgggggcggtaattctgggcgtgctctccaacggcctggtgatgctctcggtgccctattacgcgatggacattattaaagggctggtgctggctggcgcgctcgcactgacctattttcagcgccgcatctaatattttacacgtcattcttcaaattgcaggtgtgttggctgcgttcactcacccgaatcacatacttatgtaagctcatcgggattcgtttacttgccgccgtcctgcaattcgaattatttagggtaacaaaaaggaaacactatgaaaaagataacgttttcactcatcgcgctggggttgttcaacgctgcggcggcctttgctgaaaccccgacgccgcttccggctgccattgctgaacacagcgggccgattcgcattgcggtgatccgcaacctgggctccgacgataacaccactcagtttgtctccggagcgatccaggaggggaaaaagctcggctttaaaatcagtaccttcctcagcaacggtgatgacgccaaattccaggacttcgttaaccaggcgattagccagaaatacgacggcattatcctttctcaggggcgcgatccctacgccaccgcgctggtgaaaaaagcggtggacgccgggatcaaagtctcggtcttcgataccgcggtaaacggccagatcccgggcgtcaccgtcacccagcaggatgatgcttcgctgaccgagctctcctttggccagctggtgaaagatttcaacggcaaagccaatatcgtcaaactgtgggtcgcgggtttcccgccgatggagcgccgccaggcggcctaccagacgctgcttaaacaaaaccccggcatcaaagagctggaatccatcggcgcggtctcttccgacgtgcagggcgataccgccaacaaggtcggcgcgatcctggcgaaatacccgaaaggtaaaattgatgccatctggggaacctgggacgcgttcagccagggcgcctataaagcgctgaaagagaacggccgcactgagatcaaactctacagcatcgatatttccaatcaggatctgcagctgatgcgcgaatccggcagcccgtggaaggtgagcgtagcggtggatccgaagcttatcggcgctaccaacgtgcggctgatcgccaataagattgccggggaaccgacgcctgcgacctacgactttaaggcggcggcgatcccgcaggcgctgctggcggcgcagccgggggcggttaacgtcgcttcgctgggtaaaattatcccgggctggggccagaccgaagactttatcgctccgtggttcgctaccctggaagcgaaaaacaaatgagtgttttgccaacaccagaatacagccgcaatatgcggctgatcgggcatagcgatcagggaggacgcccggacggcgttcagctgatggtccatcgtggttttgcctatatcggccatatggtctcgcagggcttttccgtggtggacgtgcgcgaccctaaacatccgcaaacggtcaactacatcgccgcgccgcccggtacctggaacgtccatttacaggcgcacgacgatctgctgctggtgatcaacgcccgggatctgttcgccgatgcccgcttcgccgacgagaaggtgtactacacccgttcggtgggcgagacggtcagcgacgtacgggataggggctggagcgccgggctgcggatttttgatatttccactccggataaaccgcgagagatcgcttttctgtcgcttaacggcatcggtatccaccgaatctggtacgtcggcggacgctgggcctacgtttccgcgctgattgacggctttagcgactacattttcctgactatcgacctggccgacccgcgcaagccggaggtcgccgggcgctggtggctgccggggatgaaccaggcggcgggggagaccgcgcagtggccggaaggtaagcgctatgccctgcatcacgcgattatcgccggcgacaccgcctacggtagctggcgcgacggcggcctgaccctgctcgatgtgcaggaccgcactcagccgaagctgattagccaccgtaactggagcccgccgtttggcggcggcacccacaccgcgctgccgctcccggatcgggatctgctggtggtgcttgatgaggcggtgctggataaccagcaggatggcgagaagctgatctggctgttcgacattcgcgacccgacgaatccggtgagtatcgccactttcccgcagccggacgaagctgactacgtggcgaaaggggcgcactttggcccgcataacctgcatgagaatcgtcccggcagctttgtcagctcaacgctgattttcgccacttatcagaacgcgggcgttcgcgcttacgatatttccaacccttatcgaccggtggaaaccggggcgctggtgcccgccgcgccggcgaaaatgatggatacccgccccggtcgcccgcgggtgatccagtcctgcgacgtgttcgtcgacgcgcagggaattatttacagcaccgattataacggcgggctgtcggtgattgagtatctggggtaggggattgtgggttgttgccttcccgggtcgcggcgtaaacgccttacccgggctaccggatcgcagatggtggcgaacccgtagcccggacagatgcgaagcatcgcctccggggaaagaggcacatacccggaggcggcgcttgacgcgccttacccgggctaccggattgcagacggtggcgaacccgtagcccggacagatgcgaagcatcgcctccggggaaagaggcacatacccggaggcggcgcttgacgcgcctgtccgggctacctgatcccagacggtggtgaactcgtagcccggctaagcgcagcgcgagccgggaaaggctggacggagattcaaccgtactggcgaattcgcgcaatcagctcatccacgctgtcgatgcgatcggcaatcacaatcagcgctttacccagggtgatggcgtggcgcaggcattcatggcgcatggcttcgtcctggatagtatcgatatccgccacgtgcgacagcccgacgctgcggcgaatcagttcggtgccgcagaagcccaccgcgtcggcccacactttcttcaggaacgcggaggcatagccgggccaggccagcgcggcgtcgcgggatctctccgccgccagcgcctgaaaacgctcggcaaaggtggtccagaactgctggatatcgctgaggcgctgttcgcgagcggcggcggcatcgcgaatgcccagatgccccggcagaccgcaatagttgagcagcaggttgccgatggcggtgccgatatcgaagccaatagggccgaaaaagccgaattcggcgtcgatggccttaaagctgccttcggcgacgaaaatcgagccgctgtggatatcgccgtgcagcagcgcttcggcatgggaaaagaagcgatgcttgagcgcggccaccgccagcttcagctgggcatcgtcgcgcagggcggcgacatcggcttccagcgcggctggatagctgttgcgctcgtgaacctgatacgggtcgttaaagaacagatcctcggtgatttcgcacatctcgggattaataaattgcgccacctgggcctttttctcatgaggatgcagataaaagtcgctggtgtgaaacagcgtctgggccaggtattcccccagctggctggcggcctgggggtagtaaacgttgttgatcagctccccgcgccagatgcggtgatcggagagatcttccatcaccatcaccgccagctcgggatcgaaatgcacaatccgcaccgtgtgttgcgggcagtgctgatagtgagccaccagggtttgtgcttcaaggcgcgcgcggtcaagggtcagcggccaggattctcccacgcagcgcacgtagggcagcgcctgcttaacgataatccggctcacgcccctgatatcgaaaattttaaacaccaggttgaggttgccgtcgcccacttcctgcgcggacaccagttctgacggattgtcgataccgccaaattgttgggcgtaagccaccgcatcgctggccgtgaaagtatggtattgcgacattgcctcgatcctcaaaattctgattaagccgttcagacgtctatacttctggatttcatcctgacacaatgtgatacaacaacgcaacagggatttaactaaatgcagacactacagaccaccagcctgcgggtaagcgaaaatcagctctttattcttgaccagcaggctttaccgcaggaaaaacgctggctggcggcggataacgtggcgctgctggtggaccatattcacgccctgcgggtacgcggcgcgccgctgattggcctgtcggccagcctgctgctggcgctgctggcgcagcgcggcctgacccgcgaggcgctatctgaggcgctggagacgctgcgcgccgcgcgtccgacggcggtaaacctgatgaataatctggatcgcatgaagctggcgctggcggaggagcgctttccacaggctctggaagcggaagcgctgcgcctgatcgaagaggataaacagctttgcgccagcatcgccgaggcgggcagcgcgctggtgacgccgggcagccgcctgttgacccactgcaataccggcggcctggcgacggcgggcgtcggcaccgcgctgggggtgattgcgctggcgcatcagcagggaaaggtggcgaacgtctgggtggatgaaacgcgcccgctgttacagggcggacgtttgaccgcctgggagctgggtgaactgggcgtgccgtatcggctgattaccgattcgatggccgccagcctgatggcgcagggccaggtcgacgcggtttgggtgggcgctgaccgtattgccgccaacggcgatgtggcaaataaaatcggcacctattcgctggcggtgctggcgaagtaccatcagattcccttttacgtggccgcgccacagactaccctggaccgccattgcccgaacggcgcggcaatcccgattgagcagagggcggccgccgaagtcaccggcgtcgccggcagctttggcgcggtgcagtgggcgccgaaagaggccgccgtttataatccggcgtttgacgtcacgcccgcggcgttagtgagcggctgggtgctggacagcggcgtggtgaacccggagcaggtcgccgccggggcgtttgcgccagaaaaggcctgaacctgagcaaaaaggcgaagcgatctccctcgcttcgccttcaacttatggcagcaccatctctaccgccggagcggactgcgggtcgatattacggccaagcgccgtcagcgccgcctggtacgggcacagcgtcccgacggcggtggtccggcagcccgcctgatgccactcctggcgcagcagcggatgctggctatccggcgtttgcaggcggcgtaaatcgtccagactttgcgcctggaagtagacgcgcaggtagcgttttccgctatgggtgtcgcgccagcgttccagtaccaggctgctgcccggcgggatattgccgcggctgtaccccggcagctgccagctaaagtccattaacgtccgcaccatggcgatattggtatcgtgcgccaccagcagcagccagcgcacgttcggcgcggcgccctcttttaccccttcgagcatggcgttgagcagaatcgagccgcgtttttgcgcggtataaaacacatcgttgctcagatcgtagttctccgtcagcagcggcagcagggcggtgacctggctggcgcgggtaatattgccccacgccagctggctgagaggcaggttctcgctccagcccagacgcagcgtctcaaccatattggccatcacgctcagcccgctaatcgacgttttgccgcttttgctctgctccacctgccacggcaggtcaaataccgggcagggcttatcgggcgcgcagacggcgtttttcagcagctgaatcaccggagccagcgcctgccgacgctgcgccagatcgccggccgtcttcttcacttccgccagctggcgggcgggatcggtttgcgtggcggcaaatttatcggtctgaaacagcgggtcggcgtcgccgctgacgtgatgaatcatcacgccgcagccgggaaaggcgccgtccaccagcgcctgggcggtggcccgcgtgcgctgcagggggctggcgcgcacgtaaatttctccgctcgccggacagcccgccgcgagcagtccgagctgacgatagcgtgcgccttcatcgcgacctttattgacgacggcggcgtagccgtggccggtcagctccccgtcgtgggtggtccactgcgtccacggacgctgggtcgcggcttcgatagcctcccggttgccctccgtcggcggacgaattccgtggcggctgagctcaaccactttttccagcgtaaactgcgcggcggcgtggcccggcgcggccagcagcggcagggcgcaggcgagcagcaggcgtagcaaaacctgatgtcgtacgggcatcataaaatcttccttataagttaaacggttatgacgagaatgaggtctgacgctctatcgcgtgtcgcctggcgacaatcgcggcggtggtaaaacagaatagcgcggacatcaggccggtgcctacccaaaacagcgatagcgtactgaagtcatacagcgttttgccattttcgattatcgatgttttatcgatgatgatgccggtcagaaactcgccgagtcccgcccccgcgtagctggcgataccgatggtgccgagcgcggcgcccgcggctttacgggacgaaatatcgacggcgatcagtccgccaaggaagcaggtcaacgccccgatggtagcgccgaagataatcatcgccagaatatcggtgtagtagccgtgcggcgaccagagcatcagcgcgaagccggcggtgttgagcaggctgataaaaccggccatcacgctgcggttgcgcgggaagaagcggtcggagagcatcccggcgataatcgttccggcaatacccgcgatagcgttgaccccgataatcccggacgcttcgagggtagagtaggctttatcctgctccaggaagaagatcccccatgagttcaccgcgtagcggtcgatatacataaacgccgaggccagcgccagcgcccacagggccgggttgcgcagcgccagcagctggtttttaaacaccgagccgcgggcttccgtctcctccagcggttcgtcgcgaatcacgttgattgacgggaagccgcagctttgcggcgagtcgcgcataaacaacagcatcagcaccaccccggcggcgccgagcgcggcggtcgacagatagcccatctgccagccgaatccggcaatcaccgccgcgatcaccatataggtcatcgcttcgccgatgttatgcgccgtcgaccagatggcgtaaaaagtgcctcgctctttacagccgtaccagcgcgccagcgataccacgcacgggccgacgcccatcgactgcgcccagccgttaatcccccagaagatagccagcagcatggcgttgctggtcatccccatcatcaggttcatcccggcgctcagcagcagcccaaggctcatatagcgcaccacgttggcatgatcggcgataaagccgttgaccagcttgccgatggcgtagctgaaaaacagcgttgagccgatcatgcccagctccgtcggggtaatgccgagctccaccagcgcgcttttggcgacggtgaacgacagccggcaaacgtagaacgtgacgtacgccagagtcatggtaataaaggtttgccagcgcacgctgcgaaagcgccgctcatcgaactcgccgcccgctttgggcggcgaagcgcgaaaaaatgcgataattcttccagacataatggtatctccgaaggtcggaggcctgactgattagtgtggttcgtccatgaggtttaacccgtcatacttcaagttgcatatgcgttggctgcgttcgttcaccccagtcacttaccagagtaagctcctggggattaatgagaggctcctgcctctcaccggaggccagccttcggctggtcaaattcgttcccgacgaatttgtcgctcacttgccgcctttctgcaactcgaattatttagggttgattgtcgttgtgtagagtacataatcagataaagcctgacccgatgcggttaaggtaatgggtgacaaagcatgttttttaattgtggatagagcgtcttgctggccagcagcagcggattaccgtgacgaatcccgtcgtttgccagatagtcgttgctgaggccgcccgcttcgcgcatcagcaccagccccggcagcccgtcccaggggttcatatgcggttcgtagtagccgataagcctgcccgccgccgcccaggcgctcatcagcgccccggagccgttgcggataaacatcccgccgtcgctcagcagcgcatcgaggaagggcagaaagaccgcaggcgtcacgcggtgcgaggtgccgacgcccatcacgccctctttgaccgtcgctgccggatgcggcgcgataggcgcatcgttaagccacgcgccctggcctttcagggcgtggaacagctcgcgatggttggggtcgtacaccacgccgataaccggttcgccgtcggctatgatggccagcgacaggcaccaggtgtgcaggccgttaagaaaacagctggtgccgtcgatgggatcgacaacccacagcacgcgggcgtccggcatctgcgtcccgctctcttcgccgagaaaaccgtcctgcgggaaggcgtcagtaatgcgctgcttaacaaacgcttcgacccgcttatcggcgacgctgaccacgtcctgcagatcgtcgcctttatgatccaccgtcagccggtcgcgctgttgatagtattcgaacgccagttcagcggcggccttcgccagctcgcaggctaaacggtagcgggcctgcagttcatttgattccagtgatttcatcataactccctattttgcacacgtgtgcaaattgcctgaaaaaaacggccccgaagggcaaaatgagtgtggatggattaaaaatattattctgtgatcgctccggcataaaatgaatttttcatttcgcactttgacgaacgatcagtttcaccggcacttcgcgatggcgtgacggcaggctgaatttggcgatccgcgtgaccagcagatccaccgcgtggtgggcgagcagggcggtattctgctgcacggtagtcagctgatagggctgccagtccgcctggggaatatcatcgaagccgataatcgccggtagcgaagcggcggggttgtccgcccgcaggccgtccagcgcgccgagcgccagcatatcggtggcgcagaacagcgcctgcagctgcggatgcgcggcaagcagctgcctggcggcggcaaagcccgcctgatagccgctgctgtcgcagaagtgcgcggcgacctccatgccctgagtatgggcaacaaacgcttcgtagcgctggcgggtgctgaagttatccaggctttcgccgataaacccggcctggcgccactggcgctgggcaaacaggtcggccaccagcttcgcgccctgcgcgttgtcgctgcacacgcgatcgcagccggccagctcggcgtggcggttgataagggtcaccgggatttttcgctccagatactcctccgccagcgacagcggcggcgccccggaggtgataataacccccgcgacgtgatagctcagcagctgcctgagagacggggcgagctgctgcggatcgtcggcgttcatcagcagcggcataaaaccgttgagcgccagctggtggaccagcggcgacagcagcttgctgcggaaggggttatcaaagccggcggtgacgatgccgataaaattgctgctgccggtattcatcgtgcgggcgataatgttgacctgatagcccagcgtttccgccgcggcgaggaccttctggcgggttttttccgccaccgatgcgccgggcgtaaaggtgcgggaaaccgcggaacgtgagacgccagcgagtcgggcaacgtcctctgccttaatccattttttttcgctcatagtatcagggtacgggttatcctcagtgagcccgcgccgacgcaggaacccatggccggcacggaaaaagtcgttaaaaggtaccacataaatccccgggcgagcagtgggttgacgcggcatcgcggccgcgtcaacgtcaggcttatgccggatagcgaatctgctccgcctggcgctgcaaaataactttgccgtgacgaatggaggtcagcactttggcctggcggcgcagcgcgtcgtagtcgttttccgcatcgaggatcagcaggtttgccgggcgtccttcggcaatgccgtagttgtcgccgaggcacagggtgcgggcgctgttatcggtaatcagatcgaggcagcgctgcaaatcttcgtatcccagcatatggcagatatgcagcccggcgtcgaggatgcgcatgatgttgccgttgcccagcgggtaccacggatcctgaatggagtcctgggcaaagcagacgttgatcccggcgcggtccagctccgccacccgcgtcacgccgcggcgtttaggccagctgtcgaagcgcccctgcaggtgaatgctttcggtcgggcaggagataaaattgatgccagacgctttgagcagacggaacagcttcgagcagtaggcattgtcgtaggagcccatggcgcaggtatggctggcggtgacctgcgcgcccatgccgcgcacccgggcctcttccgccagcacctccagaaagcgcgactgcgggtcgtcggtttcatcgcagtgcacgtccaccaggcagccgtggcgctgggccaggtccatcagaaaaaccagcgagctgacgcccttatcgcgggtgttttcgtagtgcggaatgccgcccaccacgtcggcgcccatttcgatggcgcgggtcatcagttcgcgtccgccggggaaggactcaatgccctcctgcgggaaggcgacgatctgcagatcgataagatgggccgcttcttttttcactctcagcatcgcctcaagcgccgtcagggaagggtcggtgacatcaatgtgggtgcgcacgtgctgcacgccgttgtcgcgcagcatgccgatggttttcagcgcccgctggcatgtatcttcgacggtgacgctcgctttgcgctggctccagcgggcgatgccctcaaacagggtaccgctcatattccactccggctcgcccgccgtcagggtggcgtcaagatggatatgcggttcgacgaacggcgggatgaccagcttttgctcagcatcgatatcgtcggcgtcagccgcctgcgccgcggcctgcgcggtgatgcttttaatcacgccgtcctgtaagtcgagggtatagagcgcttcttgatggcgcaggcgcgcgttgataattttcatggttgttcccgtaaatggttttgcgacatacgccagatcgctaaggcgaccgaggcgttgagatgaaactgcgggtggctgaccggatagccggtcagcttctcaatacgctgaatgcgttgatgcaacgtgttgcggtgaatgcccagccgctcggcggctctgaccacgttgccgctctcctgaagcagcgtttccagggtctccatcagcagccaggggcttttgcgatccggctcaatcagacagccgagggtgtcgtgcataaagtcgctcagcagggcggggtcgctaacggcggagagcagcttgataaaccccagctgctggtagtcgctgatgcgctgggccggacgcaggttatcgctgaggtccagcgcctgacgcgcctgcgacagcgcgcgctgatatccctgcagctgctgcaccggcgccgaaaggccgcacagcagcgatagcccgtcgtcgccctccgccagtgcgatcagccacgcctggagccacgttttttgctgataaaattcgccttcctcatccggaagcagaaagagaaacatattgctgcgctcgaccagcggaaagggattaccctgctgattgagctgctgctgcagccgctggcgtatggtgcggcgggcctgctgcagccaggcttcggcctgctccggcggaaactggcgaaacaggcgcgggatcccctcaaggcgcagcgccgccacccgcagcgggcgggtaaaatccagctgctggtggagcgcccgctgatgcaggatttgcaggtcgggatagtcgccggttaacagctgcagcagaatatcgcgctgcgattgcagggcgttttcgctgcgcaccagcgcggtaccgatgcgttcggtcacgatcaccattttcagcagatagggctgttcgatcagcggaatgcccagctcgtcggccagcgcaatcaggcgcggcgagatcgcctgaatgtacgcgtcgccggtgaggatcaccatgccggcgatcccgcgctgcttgccctccatcagcaaatggatcaggttttcttcatcgcggggatggttgatcccggtgataaacaccagctccccgcccatgatccattcggcgatattttcattttccgccacgtagtaccagcgaaccgccagctgcagcccctgcttaccggcgcgcaggcgcatggcggagagcccctccagggcgaggatttcgctgaccgtcaggctcacggctactgctccgcgaccgaatcagcggcgggctgacgtttgctcagacgcgtcagcgcgatatagaccagcgcggaaacggtaatgccaaccagcggggcgatccacggtgacaggtaagccaccgccgcgcccaccgcgtaggcgctaagacccagccagttaaagcgcggcaaacgggcggtgtgcagcagcggatagcggccgccgcgataaaaccagtagtcggcgaggatcacgccgccgatgggcggaatgatgctgcccagcagcacgaggaaagggatcagcatttcatacataccgccaatggccagcagaatgccgacgccggcggcgaccacggtcagggtgcggcgacgctcgctgcgcagcagatgacaggcggcggccgagacgttatagatcgtcggcccctgaatcgtcagcaggttgaggcacagcattaccaccgcggcgaccgacagcccctgcaaaatcagcacctcgacgatatcggcctgctggtaaacgatggcgcaccaggcgccggcgataatcatcagcccgttgccgatcaggaagctgctcatgctggcgacgatggcggtgcggctggagttggccagccgcgtccagttcgtcgcctgggtcgcgccgctggcaaaggtgccgaataccatggtaatggccgccgaccaggtcatggtttcacccggttcgatttgggtcatcgcctgccagccgccggcgtgatgggcggcaaggtacatcgacaccaccagcagaataaacatcagcggtaccgatacgcgcgacagcgcatccagccccttatagcccaccagcgcggtgacgcagaataggatgccgaacaggatcatcagcggaatcgtcatcgccgcaggcagggcgaggattttgaccagcgagatggcgaccgtcgcggttccccaggcgtaccatcccagctcggcgaagccgagaataaaatcggcgagcttgctgccgatttcaccgaagcaaaaacggcccatcagtacggtatttagcccgctgcgcgcggcaatccagccgagcgaggcggcgtacagggccagcagaaagttaccgataaccgcaatccacagcaggttaacgatggagaaagagacgccaagcttgccccccgcgaacatggtgccggtgaaaaaagtaaagctgaacagaaccatcgagatggaaaaaacgcccttgcgcccggcggcgggcgcttcgacgagcggaaaatcattgctgtttgacatggtggaacctctgagtggctatccaaatagcgatggcagaggggtagcaagaggtgtgccagaaaaagcggggcagaggtaacacaatggggtgggcagtatgcacataaaacgacgttaaacggccgctgtttgccataaatgtgtgcacagtgccatgttttgcaccgccgtggggcagtgggatgtgactcctgcccctgcatttttggcggacgacggctggcgtcttacccgaacagggggcaggtcagaatcgacaaatgatgccaattttacgccgtttcccggcggcacgatcccccatctttttaaccgcccgcaggcggtaattttggcgtcatgaaaatgctcagttgtattgttgttaaaaacagtaatttcatatgcttttctgatataaccattatcaatgtaagtctttcctgaaatattgttcgcttacgctggcggtgttagtatcgggtaaatagccatttagacggctaaatacaacatcgctaaactaaggaactgctatgtggcaagaaagactcgcgcaactggtcaccacctgtcattggatcggcgcgaaaggctgggcaccggccaccggcggcaatatgtcggtgcgtcaggatgagacctggtgctggctgagcgagtcggggcgtgataaaggcagcctgacgacggaggatttcctgcaggtggagatcgccagcaataaagcgccttccggacgtaaaccctctgctgaaaccggcctgcataccctggtgtatcgcctgttcccggaagcgaatgtcgtgctgcacgtgcataccgtcaacgcgaccgtgctgtcgcggattgaaaaaagcgccaccctggcgctgcagggctatgagatgcagaaaaccctgaccggccagcacagccatctcgaaaccgtgccggtcgccatttttgataacgaccagaatatcgatgccctggcggcgcgcattgaagattatgcgcagacccacccgctgcgctacggcttcctgctgcgcggccacggcctgacctgctggggcaaagacattcacgaagcccgtcgccagctcgaaggactggaatttttgttcgaatgtgagctgatgcgccgccgctacgagcgcgactaatttctcttcaccaacgggtcaggcatggatttttatctcggaatcgatatcggcacctcgcgcgtgaaagcggtgctgtttgatgaatgctttcaggcgtgcgccagcgcggcgcagaacaccggcccgcggctgtcggccaacggtcacgccgagcaggatatggcccagctgtggcagtcggtggtggcgattttacgcgatattgcccggtatccggcgctgcaaagcgggcgtttacgcgccatcggccttgccgggcagggcgaaggggtctggctcagcgacgccgaaggcgaaccggtcgggccgggtatcctgtggagcgacacccgcagccgcgacctgatgagcgaactgctcagtcgccccggttttgaccgtcgcttctttgacgataccggtacccatctgcagccctgcaacaccagtatgcagctgtactggctcaagcatcaccagccggagcggctggcggcggcccgctatctgtttttcgccaaggactggatccgctttcgcctcaccggcgtcgcggcgctggatcttaccgatgccagcacctctttgctgaatcagcagagcggaaagctatccacggtggtgctcaatgagatgggcctggcagatttacaatctctgttcccaccgctgctggcgccggacgctcaggctggaacgctgcgtgaagaggtcgcggcgctgaccgggcttcccgccgccacgccggtcgcggcgggcgcgctggatgtgtgcagcgcggcgctgggctgcggcgcggtcaacgatggcgatatttataccattcttggcaccacctgctgcaccggtatcgtctgccacggtcgccagacggtcaacgaggggacgcgctacgtcacccataccgaagcgggcagctttattaacctttttccgatgcaggccgggacgccgaacatcgactggctccagcagcagattgcgctggagccggatttacagcagctggaacagcatatcgccagcgttgagcccggcagcggcggcgtcttctggcagccctacctcaacggcgaacgcgccccgttctttagccccgaggcgcgggccggttatttcggcattagccagcacaccacccgcgcggagctgctgcgggcggtgtttgaagggctggcttacgctatcgtcgactcgcttcagggctacccgcagggcggcgaactgtacctgaccggcggcggcgcggcttcggcgacctggctgcaaatcattgccgactgcaccggcagaacggtggtttccagtcctttcaacgagcttagcgcgcgcggcgcggcgattctggcggcgcgcagcgtcgatgccctgagccgctatccggcgctggagcagacccgctatcgaccccatccgcaggcgcacagccgctacgccgcgctctatccggtatatcgcctgctgcgcgagcagatgctcccggtgtggcaggcccgccgcgaggcgcttcaacgtatttctcaggaacaacgcatatgaaaattgtttttaccgccgaacacgccggcgacctcagcgcttttcagcaactgggcgaactgcgggtagaaggctgggcgctgggcaagccgaagctgagcgcaggccagctgatcgaactggcccacgacgccgaggtgctggtgaccagctacgatgaggtgacggaagcggtgatcgccgcctgcccgcgtttacaggtgatcgcctgcacccgcgccaatccggtgaacatcgataccaaagccgcccaggcgcgcggtatccgcgtgctctatacgccggggcgcaacgcggacgccgccgccgagctgacgctggggctgatgctgagcctggcgcggcatattccgcaatcccacgcggcgctgaagcgcggcgaattcacccacgccgaaaacgccgcgcaggccacccagagcggactgcgccgcgatgtggtgtgggacgttagtccgcaaagcccttatgaagtctttaaaggcagcgagctgcgcaacaaaaccctggggctgattggctacggtaatattggccgccgggtggcgcgtatcgcccgcgcctttggcatggcggtactggtggtggacccgtttgtcgccgccgaggatatcaacgaaccggggttgcaaaagacgacccttgaggggctgttccgcgaggcggatatcgtgagcctgcatctgagcagcggcccgcacagcgatgggctggtgaacgcgccattgttgaacagcatgaagccgggcgcgctgctgatcaatacctcgcgcgcggcggtcgtggacgaagaagcgctgattcacgcgctgcgccatggcccgctgggcggcgcggcgctggatgtttaccatcgcgagccgctgtggcgcgaccatccgtttgtcaccgagtttgataacgtgattattacgccgcatatcgccggggcgacgcgggagagcattgctaaacatacggcgatgattgccgccgacctccagcgctatgtcgccggagagccgctgctttatcagtggcgttaagccgcgcttgccgccgcgcaatgcggcggcgaagcttgttatccgcgacggtgggtcgccataaactcctgcgtatgctgccagtccaccacgccggcatccgatcccatgccggtcgccaccagcgcggcgacggcggaagccacctcgcacgccgctttgacgcttaacccccgggccagtgcggcaataaagccgccgcagtagctgtcgccgcagccggtagtatctacggcatcgacccggaatggcgcgatatgctcgacggcgccgtcgcgggtcagcagccaggagccgttttcgccgtccttcagaatgcaggttccgacgccaagcgcaaagaagacgcgggcaatcgcttccggctgggtctccccggagagatacgccgcttcttcaagggaaggcataaagtagtccaccgacggcagcagcgggcgcagcagatccagggtgcccgcgtcgggggcgattaaatcaaagctggtggtgacgccgcgggctttcgccgcccgcagcagcagcgcgctttgcccgctatccatcgccgccagcaggccggtgccgccgtggtgcaggaaccggcagtcgaggatcgcgtcaaactcttcttcgcggataaaaagcgcatcggaagcgccccgacagtgcagcgccgggcgctcgccgttagggcggatgggcaggatcgtcgccgacgtttcctgctgcgccttacgctggaccagcgagcagtcgatccccagccgcgcgtagctggcgaggataaaatcggctttttcatcttcaccgaggcaggccaccgcggcggtgcgaatgcccagcttcgcggcgttaatattggccccggcggcggttccggcggggttaagacgaatttgttcgataaaggctaccccgccgcgcggcgggatgtcgatcaccgggcgaccggcgatatcaagaatagtcaggccgacaaagacggcgtcaaaagctgccataggtgctccgcttaacgatgagtctggcgcagacgcgcctgccagaaggagagggccagcgcgaccaccagaatcacgcccaccagcgcatccttcaccaggtagttcagccccatcaggttcaggccgttatcaataatcgcgagaaacagcaccccgccgagggtgccggcgatgctgacccggccgagccggttaaaggcggtgccgataaagaccgcggcgatggcgtccatcaggtaggcctggccggccagcggcgtaaactggcgcaggttggcggagagaatgacgccgccgacggcgcacagcgcggaggccgccaccagcacccacagcatggtccggcggtcgcggatcccggcgatacgcgccgcttcgccgttctggccgatagcgcgcacgtacttgccaaacagcgtgcgttcggtcagcagccaggctaccagccacagcgccagcacaatcaccaccggcgtcggaataccggcgatattgccgaccgccagatcgtgatactccggcgccatccggcggtaggagatagagccgccgccgtcggtatagatacgctcggcgctgctggcgataaaccaggtgccgagggtggcgaggaacggacgaatctggcagacaaggatcagaaaggcgttcagcaggccgataatcaccccgccgagcagcgcgcagcccaccgccgcctgccacggcaggtgccaggtcttcagcgccaccagcgcaaaagcggcgccgaaatccagcgccacgccgacggagaggtcaatcgccccggcgctaacgataagggtcatcgccatcgccacgatcagcagaatcgcgctgccctgcagcaaattggcccagttatcgaaggtcagaaataccgggttcgcccagccgaacagggcaatcgccagcagggtaatgacgccgaatcctgcccgcgatagccacgccagcggaccgctgccggtttgccccgttgagggggtcttgagcgtcagttggctcattaatggcctcctttatgtctgaccgccgaagccgccagcaccacgaggatcaggccgcctttgatcgcgcccatccagaaaatattcactcccagcaggccgagcccgttagagagcgcgttgaccagcaccgcgccgagcagcgccccccagatggtgaccacgcgccgccgcgagaacgccgcgccgataaaggtcgcgaggacggtttccagcagcagcggcgtcgccgtgccgctggagctgcctgagccctggctgagcagcggcaaaatcgccaggccggcggcgatgcccgccagcagccagacgataatggtcaaacggcgaacgttgagtccgctcatctgcgccatatcgcggttaccgcccaccgcctgtaaatgctggccgaagcgggagtggtggagcaaaaactgaaacagcgcgaagaccgccagcagatagagcagcggccagggaatgccgaacagatcgttatcgcgaaaggccaccatcagcgggtcgctcaccgcgatgcgccgctggccggtcagcaggtcggtcaggccggtgaaggccaccgaagttgacagggtcgccagcagcggcggcaggcccgccgccagcaccagcgtggcgttgacggcgccgcaggccaggctaacggcgatcagcagtaacaacagcgccaggtaaggggtgttccactccgccatgccgaggctgagcagcgcgacgccgagcaccgcgatggcgggcagcgacaggtcgatgccgccggagaccacatcatcgccgccgacggcaatcacgcagaccaggccgaagcagaggatcgccagcggcacgctttgcaccagcatcatgctgatattttgccagcttaaaaagaaaggcgactgcaggctgagccagatcagcagcgcaaaaaagagaatcaggggaaatttttcgataagcgtcgtgatgcccggaagggggcggcgctggatacctgcactcatacctgttgttcctgtccaccgttaatcgtcaccagcagcgcgtccagcgtcagcccccgggtcgggagattggccaccaactcgccgcgccacatcaccaggatgcggtcgcaaaggcccagcagctccggcgcgtcgctggatgagaccagtacgccgcgaccgcgatccgccagctcgcgggtgcgctgataaatatcgcggcgcgcgccgatatccaccccgagagtgggttcatcaagaataaaaagccgcgcatcggtgcccagccagcgggcgagaatcgccttttgctggttgccgccgctcataaagcgcaccggaagctccggacggccggggcggatagagagctggtcgatccagctgcgcgctttttccagcgcccggccgcggtgctcccagccgaaagtggcggtctccggtagcgaggccagattgatattgtcggcggtggtgaaggggagaatcagcccctgatggcggcggtcgcgcggcaccagggccagtccggcccgggtagcctgatacggcgtccgcagccgcttcggctggccgtcaacgcttatcgtaccgctgcgggcgcggcgtagcccgtaaagcagatcgatcagcacgtcgcgcccggcgcccagcagtccggcgacgccgacgatctcgcccggctgaatatcaaaggtaatatcgcgtaactgctgcccgtcgctgagatggcgaaccgacagtaccggggcagcggcatcgacttgatgcgcgctgctctggcgcggggtatagagctgttcgatatcgcggccgaccatcattttgatcagcgcgtcggtattctgcagaagcgcccggtcggggtagccgaccacctcgccgttacgtagcaccgtgccgcgatcgcaaagggcggcgatttcgttgagatagtgggaaatgtagagaatcgcgatcccctgttcccgcaggcgcagaatcgcggaggtgaccaggccggcttcctgcgcttccagcggcgcggtgggctcatcgaataccaccagctttgccgcgccgtcgatcagcgctctggcgatttgcaccagcttgcgttcggcgaggctgaggtcgcggatcaggcggcggggatgaatatccagctgccagctgtcgcggaaaaacgcccgggtggccgcgttcattcgccgccggtccagcgcgccccagcgggtgcggtactcctggccgagaaacaccgattccgccaccgtaaagtgcgggattaggttgagttcctggtgaataacgcggatacccagcgcttcaatcgccgcgggattgccgagcggcagcggcgcgccgtcaagggtggcgctgccgctgtcggcccggtagacgcccgcgaggatttttattagcgtcgattttcccgcgccgttctcgccgatcaggccgtgaatttcaccgggattcagaagcagcgtgaccgcatttaatgcagtcacgttggcaaagcttttgccgatctggttcatcgccagaccagcggcggggttaaccccgccggaggatggagtgatcactgcagttcgccatatcccagctgtttgtagaccgcttttgcctcctgcgggcctttcaccggcaccaccggaataaaggtctgcagcggcagcttctgtttgtcgaagtagcgcgcgacgttatcggcggaggtctggccgatcaggtgcggctgctgggcgacgttggcgacgaacgggctgcccggctcggccatgatctccagggtttccgggccggcgtcgatcgcggtgaccttgacgtctttatcgcggccggtctcttccagcgcctggacaataccgatagccggctgatcccagcaggcgacatggatggcgtcgagtttgccttttggatactggctcagcagttcgagggttttcttacgcgcatcttccggcgagttggcaaactgctcggccagctccggctgaataatgtgaatatccggataatccttgaggacatatttccactggtcataacgaatgccgcaaatacgcagggagctggagaatgcgttaaataccgcaacgttgcctttgccgcccagttcatcggccatatagcgaccaatggtcgatcccagggtgtagttatcggaggtggtgttattgaccgaatattttgaaacgtggtctacggtaaataccggaatgccggcatcgcgtagcgctttgaatttaggctcaacggcgctgtcgcccagaatgctaattaccgcatcgaccttgcgcgacagtaaaatatcgtggttattcgcatgaacctggttatcgcggccgccatcgacgccgattactttaccccccagtttctctacctcttcggtcgcacccttataggcttcacgatcccagaagtgctgcgtcccgaccacggcgacgccgatagtttttccctgaagtgataaggcctccgccgccagagcgttgacggaggcgagcgagagcaggcccagcgcgatgggcaataatttcattttctgcgacattcttattatggtcctgtgatggaggtggctgtgcggagcagtagcatgacaacaacagccacacaatctcaaatacaaaatatgtctaagttatacccgttatacttcaagttgcatgtgcgttggctacgtgcgttcacccgaatcgcttacttgagtaagctcatcgggactctcttacttgccgcgttactcggcctgcggcctcaccccttacggggccagcgcaagcgctgttcaaaacggttaaccgttttgtcctgaaacttgaattatttagggtatattaacgatgttatatcgcagatttgcctgaggaaaacgtaaatttgttatctgtaacctgaaaatatttcatgatgcagcttaatccctttttattttgtgggcttaatttgcttgcaactcttatttattcaaataaagattgctgcttaattaaaattattctgtcgctgtaatatatcgtatcccggaatggcgtagaactattctgcgtggaaaatcctttctcagcagcagattgtatggtgatacgtattttattcccaggattcgcacgctttattatggcggcctttatcgggtgagaagaaaacaggcaagatgaaaaaacaacataatctgaccgtaatgcactggggaacctggcaggtccaggcccgtgacggcaacattgaggcggtgacgccggtgccctgggataaaaatccctcacgtattggtcagtcgctccccgatgcagtcaccagcaagacgcgcattcgccgtccggcggtgcgcgcgggctacctgcaaaatggcccggcttcgcgcgaggggcgcggtaaagagccgtttgttgaggtgagctgggaggtggcgctcgatttactggcccgcgaactgaattcggtcaaagcgcgctgcggcaatgaggcgattttcggcggctcctacggctgggccagcgccggccgttttcaccacgcgcaaagtcagctgcaccgcttcctcaagtgcttcggcggctataccgccagcaccaacacctacagcagcgcggcgggcgagcgcatcctgccgcatattctcgggccgctgagcccgctgcaccgccagcacacccacttttccgagctggcgcgcgaatgccagctgtttgtcgcattcggcggcctgccgctgcgtaatgcgcaggtcaacggcggcggcgccaacgaccatatgctgaaatactggctggaaaagatgcaggcgcaggggacgcgctttatcaatatcagcccggtgcgcaatgacctgagcgccgtggagagcgccgagtggcttgcggttcgtccgggaaccgataccgcgctgctgctggcgctctgttatgtgctgattaatgaatccctctacgacagcggttttatcgccagccataccgtgggtctcgcgccctatcgcgcctacctgatgggggagagcgatggcgtcgcaaaaacgccggagtgggcggcggcgataaccggtattgaggcgcagcggattgccgcgctggcgcgcgagatggccagccagcgcacgatggtcaatatctcctggtcgattcagcgggcgcgccagggcgagcaggcctactgggcgacggtggcgctcaccgcgctgctggggcaaatcggtacgccgggcggcggactggggtttggctacgcctgcaccaatctggcgggggcggcgcgtaaggccttttccgggccgcgccttcccgccggagagaacgcggtaaaccaggtgattccggtggcgcgcctttccgatatgctgctgcatccgggcgaggcatacgagtttgacggccagcatctgcgctatcccgacatccgcctcgtctactgggccggcggcaacgcgtttcaccatcatcaggatattaaccgcctgtgtgaagcctggcggcggccggaaacggtggtcgttcatgaacagttctggaccgcgcaggccaaattttccgatatcgttctgccggtcaccacgtcgctggagcgggaagatatcggcagcggcggtcacgacggctttatgatcgccatgagcgcgcagatcccgccggtgggcgaagcgcgcgatgattacgccatcttctgcgaccttgccgagcggctgggctgcggcgagcgctttagcgaggggcgcgacgccgggcagtggctgcgggagatctacgaagcgtcgcggccgcgcgcgcgggaagaggggatcgcgctgccgtcgtttgatgaattctggcggcagggggtgctggaatacagcgcgccggagaaaccgcaggttttcctggcggattttcgcgccgacccgcagcgctatccgctctctacgccttccggcaagatcgaacttttttccgaaaccatcgccgggtttggctatcgcgagtgtcccggccacccgtggtgggatgagcaggaggaggcctggcagcggcaggaggcggcgcgctggccgctgcatctgctctccagccagccgcgcacccgcctgcacagccagtacgatcacggcagcgtgagccgggcgacgaaaattcgggggcgcgagccgctgtggatgcatccgcaggatgcgcaggcgcggggcatcagcgaaggcagcgtggtcaaggtctttaacgcccggggagccattcttgccggggtgcacctcagcgagcagattttgcccggagtggtgcagatgtcgaccggcgcctggtacgatccgctggatccggctgaaaaggggtctctggataagcacggcaatcccaacgtgttgaccgaagatcgcggcagctcgcggctggggcagggctgcagcgcccaaagctgctgggtggagattgcgccgtggcgggacgcgctgccgccggtgaccgctttcgacccgccgatgtttattcagggttaggcgcccggtaattcccggcttacggaatcaaagccctcctggggcggatagcccggacagatgcgcagcatcgcctccgggaaattcagccacgctgcgttctgctcccgggggcggcgcagggcgcctgcccgggctacatgttcacagttgtctgcagatcggtagcccggataaggcgcgttacgccagccgcgggtaggcgctggcgatatcgtcgccggtaaactgggcaatccagccttccgggttgtcgaagatgcggatagcggtgaagttgggctccgagcccatatcaaaccagtgcggcgtgtgcgccggaacggaaatcaggtcgttcttttcacagagcacctggaatacctcgtcgccaatatgcaggcaaaacaggccggctccctcgacgaagaagcgcacttcgtcttccccgtgggtatgctcgttgaggaatttttcccgcagcgcctctttctgcggattatccgcacgcaggctgatcacgtcccagctctggtaacccttctcagccaccagcttatcaatcgcatgctgataggcggcaataaccgtttctgaggctggcgccgggcctaaatcgcggtcggcctgccagcgctcgaagcggacgcctttggcgttgagctgctgctggatctcttcggcgttcgtgctgtgccagagagaattttgcgggtctttcacggaaaaaatggttaatgcgctcatgctgggatctgctccggatgaatatcgtcaaaacgctgaacctgcggatggtggctggccgggtcacggtcgccgcgcaccagctgtagggtgcggaagccggcctcttcggcggcatccagctcctgatggatatcggacaggaacaggatggcggcaggaggctgtcccagctgctcagcaatattgcggtaggactgcgcttcgcgcttggcgcctaccagggtatcgaaatagccgttgaacagatgagtaatatcaccttcgtcgctgtagccaaataacaatttctgcgcggcgacggagcctgaggaatatacatataaatcaacgccctgtgacttccatttttccagcgacggcaggacgtcaggatacaggtggccggtgaagtcgccattgacgtagccttcgcgccagataatcccctggagcgccttgagggcggtagatttgcggtcttcatccataaaggcgaacagggtagcaataagctgctcgacgctggccgccggttgggcgatctcttcgcgcaggttatcgagaatggtctttaccggatcgacaaactgctgggcggtcacgaagccggccaggcgttcgcgagcgtacgggaacaggacgttgtggacgaagcgaatgtcgctggtggtgccttcaatatcggtcacgatagcgcggatcatgagttctccagagtgagcggtaggtcgtgctgacggtggcgttgtgctgctcgctgttttccactcataagcataagcgaaataacattatcatttagacgtctaagcgtcttgattgccaaatattaacatcgtgttatagtggcttcaacaacagcatgacagacggtacaaaaagaatgagcaataagccactgattcctgagagtaaacttccttcactgggcaccacgatctttacccaaatgagcgctctggcccagcagcatcaggcgattaacctgtcacaggggttcccggatttcgatggtccgcgctatctgcaggagcgtctggcgtatcacgtggcgcagggggcgaatcagtacgcgccgatgacaggcgtggccgcgctacgcgacgccatcgtcgataaaacggaagagctgtacggctatcgtcccgatgccaacagcgacgtgaccgttaccgccggcgcgacggaagcgctgtatgcggcgattaccgcgctggtacgttccggcgacgaagtcatttgctttgaccctagctatgatagctacgccccggcgattgagctgtcgggcggcgtgctgaagcgcattgctctccagccgccgcattttcgcgttgactggcagcagttcgccgcgagcctcagcgacaaaacccgactggttatcctcaatacgccgcacaacccgtcagcgacggtatggcagcgggaagattttgccgcgctgtggcaggcgattgccgatcgtgaaatctatgtgctgagcgatgaggtttacgaacatatctgctttgccgccgaagggcatgccagcgtgctggcgcatccgcagctgcgcgagcgggcggtggcggtctcttcgtttggcaagaccttccatatgaccggctggaaggtgggctactgcgtggcgcctgccgccattagcgccgagctgcgtaaagtgcatcagtatctgacttttgccgtcaatacgcccgctcagctggcgattgccgatatgctgcgcagcgagccggagcactatcgccagctgccggcgttttaccgcgagcggcgggacctgtttattgatgcgctgcgcgccagtcggctggacattttgccctgcgaagggacctacttcctgctggcggactacagcgcggtctcggatctggatgatgtcagcttctgccgctggttaaccaccgaaatcggcgtcgcggcgattccgctatcggtgttctgcgccgatccgttcccgcataagctgatacgcctgtgcttcgccaaacagccagccacgctgctggctgcggcggaacgactgtgtcgtctgtagttatttaacggtccacgcctgagaaaattgacggtcgctgaacatctccaccagaccgttgatttgcttcaggcgcaatacttcgtctgagtccatccctaactctttgccgattttctcgtcacaccagccgagatgcgccagctcctggacgatttccgacatcgcatgaatctgatgacgtccgcgcgcccggttgtggcggatggtggcggccatcagcgaatcacgcctggggctgctcttttccaggcaggtgacgggaaggtagcctttcagtcgtttcttcagcgccgctctgccgctcgccagctcatgacggtgaaaaccgtcgataatggaatagcgctcctgatcctgtttcactaccacaacgggctgcgtgaagccgtccgtttccagcgaggtaaacagcaggcgtttttccggtggcgcaagattatttgggttgtaatcattaggcaaaacggcgccctgttttacccacaatacgcagtcaaccggttgggatttgaaggggctatattcatgcagaatctggcgaaaggcgttaagcgcagtaatcttttcctcttcatcttccagcgattgcagatagcgttcgagatcctggattaattgtcgttgcatagtatcccccattgctggcgctttttattcatccgttcgcgatagcgtttatattgattcgctttggtcgggctgaaagagagctggcggcaccagtaatcattgttcaacagaactttacagatgcgccgccaggacgggacgtctttcgagccaatatccgccggctgcgtgtccggaatatctatcattccctttttttggtaccagtgaagatagacggcgattttattgcggtaatgttccgccgttttctccggcatgctgtcgagtaaaaacagggcgtagcttttccaggtatgctgcgcaggtttatccagctttcgatggccgtagaactgattatcgtgaccggcataaactccgccgcagtggacgccgctgacgcgatggcacatggcggcccagcgttcaggctccagcacatggtagagccacagcccctggcgctgctccgggccaaagggttcgcagatacgcatatagcgcagcggaacgcccgcctgatacatcaggttatagagcgggttgtaggacaggccgcttttgccgaaccaggtccagatatcggcggttttccagtcgtagataggatagatgtaccacgcgtgtccgcccggcgcggaggtggtccagggtttatcgtcggcgaagcgaagcttgcgctgcgaggagatggtgataaaccgatttaacgattcatcggcgcggatgccgatcatcaccgccgcggggcggttttgcgaaaaccaatcggcaaattcgcgaacgaacgtttcaaaactcatgcccgattgataaaacgggaaaaagccgggatcggtaatcgcgtcctttggcggttgtcgcacccagggcgcgccgggttcccagcactgccattcgggatgatattgggtcagagaattctgggtagtgagaggcaacgcgacccagaaaaattgctcaataacgtcgcgatactctgcgcgcatcttttcacaatgcgcaatggtgcaagagaactgcgcttcccaatccacaaacaggacgcaaatctttttgcctgtacggcgggcgtgctgcgccgtgagatgcagcatgattgtagaatctttaccgccagaaaaagagacgcaaacacgggagaagttttccattacccattctattcgctgctgactggcctgcagaacggactcgggtaatggaagttttataaaagacacagccattattcctttaatgctaaaagatactgtgtacttatatcacatttatttcttaatcaagagattacttattattcgttaatcaaattaaatggcattaactattcaataattttattcttttcacattcgtcgataaagtttgcaaagttcgggtcgtcaaggtttacccgattgtaaatcatataaatagtgatggaagggatcttaaatggcgcctctataaccttaaatttattatggaaactgatgtgttctaaaatacaggtgggtacaaacccaataatatcagtttgctgaataacattaaggatcgctatgtatgaatcgctacggaacgaaattttcctgtcagacagtatgccggccgcctggctttgaaacgacttcgttccctgatcgttgcaaatataatacgtaaagcgctcctgcagtatggctttcgtcgttgttagcgatgccagccgaggatgattttcactacagaccagagaaatgcccagctcctgaatacgtttacacacggtagcccgcgatgacaggggcgtggtgctaaatatcaggtcggctttacggtaggccaacaggctttctaccgactctccggacgccagcagatcgtgatgttctacgtgtaagtttgaatcatctaataacatatggatcaggctggttgtttttggggtaataaaaagctgcggcgcatagacaaccaggcgtttctttaactcagaacgattggtgagataaatagtttgttctaattgattaagatttttttcaagatgatggtggagattaacccctacggtggtcggcgtaattcctttacctgaacgaacgaatagcggatcattcagctgggtgcgtagccgctgaagcgactgactgacggcggagggcgtaataaatagcgtttccgccgctttactgatgcttaaatgctggtaaatacattcgaaaataacgagtaggttcagatcaaatttcttaagatcgtaaagattagccattatcaacgtcctgttaagctggcggtaagggaaactggtgaatatgtatctgtattatattcattgtatgaatatttgtttcttgttatttaatgcaggcgccgtcattaagtttatctaaatatatactaccgttgcgtattctaccagatccttttgtgtaccgctaaagtcaggggagtgggttatttataaatacttaccttgccccgcttagcatctgtagtttttctttaacgggaagcctgaacgcttgttgaagtttatttggttattcatattataaattactgatacgtgagcggcactgaggatgttcatcaaccgcgggcggtaattaaattctttattctccggctttcgctggtcctgcgggcaagtatggcaagtggaagagcggcagtgggggcgtctgcatcgcgctaacgcgggaaacatgtcacaaagaacgggcattttgacatggtgatgctctgtgaaatcaccggaaaagtaggggtagcggtaaaacctatcacagtcataggtaacacctgccgccgcgtggattgccctttcgttcagcgggtgatgtaatcccttagctgttacattaaggtgtagagcgcaacacattgccagctactggcgctgaacctacctgcgggtgtttcaggtaacggggccgcctgcgagggcggcctttttacttttcagcgcatataatgcgaaacgcggtagaagattgtcatcgcgttgacaggttcacaaagttgtcttgttccggttgttagataacgcttattgattcgataatgcaaacgcattggtcgagtcaggaaaaattcgttaacttagacctcaacgaaaacacggaggaagtatagatgtccttaattaataccaaaatcaaacctttcaaaaaccaggcgttcaaaaacggtgaattcatcgaagttaccgagaaagatactgaaggccgctggagcgtcttcttcttctatccggctgacttcaccttcgtttgcccgactgaactgggcgatgtggcagaccactacgaagaactgcagaagctgggcgtagacgtttactccgtctctaccgacactcacttcacccacaaagcgtggcacagcagctctgaaaccatcgcgaaaatcaaatacgcgatgatcggcgacccgactggcgccctgacccgtaacttcgacaacatgcgtgaagatgaaggcctggcagatcgtgccaccttcgttgttgacccgcagggtatcatccaggctatcgaagttaccgctgaaggtatcggccgcgacgcgtctgacctgctgcgtaaaatcaaagcagctcagtacgtagcttctcacccaggcgaagtttgcccggctaaatggaaagaaggtgaagcgactctggctccatctctggacctggtcggtaaaatctaaatttccatcgtctttcacgccaacgcagctatggcgtgaaatacttgggaaattatttcagtcatgggcgcaccggcgcccattttattccaacaccatgatgcaagcgtattcaggctgcctgaacgaggccgcttgcatgatgatgttttaagcccaggagataaaaatgctcgacaccaacatgaaaacccagctcaaggcttatcttgagaagctgaccaaacctgttgagctgattgccacgctggatgacggcgctaaatcggcagaaatcagggaactgctggctgaaattgctgaactgtcagataaagtcaccttcaaagaagataacggcctggcggtgcgtaagccgtcattcctgattaccaaccccggctccagccaggggccgcgctttgccggctctccgctgggacatgaattcacctctttagttcttgcgctgctgtggaccggcggtcatccgtcaaaagaagcgcagactctgctggagcagatccgcaatatcgacggtgattttgaattcgaaacctactattcgctttcatgccataactgcccggacgtggttcaggcgctgaacctgatggcggtactgaacccgcgcatcaagcacacggcgattgacggcggaacgtatcagaatgaaatcaccgaacgcaacgtgatgggcgtaccggcggtatttatgaacggtaaggaatttggtcagggtcgcatgacgctgacggaaatcgttgccaaagtggatactggcgcggaaaaacgcgcggcggaagagctgaataaacgtgaagcctatgatgtcttaatcgttggctccggcccgtccggcgcagcggcagccgtttactccgcgcgtaaaggtattcgtaccggcctgatgggtgaacgctttggcggccaggtgctggataccgttgatattgaaaactatatttcagtacccaaaacggaaggccagaaactggctggcgcattaaaagcgcacgtcagcgaatacgatgttgatgtgatcgattctcagagcgcctccagactgatcccggcgacggttgaaggcggcctgcatcaggttgagaccgcctccggcgcggtgctgaaagcgcgtagcgttatcattgccaccggcgcgaaatggcgtaacatgaacgtgccgggtgaggatcagtatcgtaccaagggcgtgacctactgcccgcactgcgacggcccgctgtttaaaggtaaacgcgtggcggttatcggcggcggtaactccggtgtggaagcggcaatcgatctggcaggcgttgttgaacacgttactctgctggagttcgcgccggaaatgaaggccgaccaggttctgcaggataaagtccgcagcctgaaaaacgtcgatatcattctcaacgcgcagaccacggaagtggtgggcgacggtagcaaagtcactggcctgcagtaccgcgaccgcgtgagcggcgatgagcatcacgtggcgctgtcggggatcttcgtgcagatcggtctgctgccgaataccaactggctggaaggcgcgattgagcgcaaccgcatgggtgaaatcatcattgatgcgaaatgtgaaaccaacgtgaagggcgttttcgctgccggcgactgcacgaccgttccgtacaaacagattattatcgccaccggcgaaggtgcgaaggcgtctttgagctcgttcgattacctgattcgcactaagactgcataattcataataaagtaagaccaaacctgcacagcaaagaggctaccctggggtagcctcttttttcaccttaccgccgctacctgaccaccatcaccggaatatgcgcatggcgaatcacgcttgaggcgttggaacccagcagatgggtgctgatcgaagggttacgggagcctatcaccaccacatcggctttaatttcattggccagttcattgaccatatcgcgcacgttgccaaagcggacgtgcattttgattcgcgacgggtcaatgctgaaatggccggccatcgttttcaggcgcgtttctgcttcatgctgcaaatgctcttcaaagcggcgcagatcggcggtaaaacgactcatcgtgaagcttgatgaaccgggtagtacgtggagaagatggataaccccgtcctgctgggctaaaaactccgcatggcgaacggctttatcgcttaactccatttcaaagacatcaacgggcataatgatggttttatacatatgcattcctccttgttcgtctgcttttatatcaacacattataggaaagtattgtgccattcaggtcgcaaaattgtcagaacggtacgagggcggcgtaaaagtttgtcaaaagagaggagaagagcgaaagatgcagaaagaggatgcagtaacatcctctgaataaagcgcgaaacgcttcaggcagcggggagattaacggtgaaaatcgccagcggcctccggctgatacagcagttccagcacttcaaggtgcgttgaggtgccgcccggtaattcccagtgaatcgtgctgccgactttgaggcccagcagggctgcgccaaccggcgccatcaccgaaagctgggtggcgctatccgtgacctgcgccgggaaaaccagcgtgcggatgcgctcttcaccggtggttaaatcgcgaaatctgaccttgctattcatgctgacaacatcatgcggcatggcttccggggccagcatctgcgcgcggtcaagctcgtcattcagcgcgtccgctaccggtgagttggcgaaagccggttgttccagcagtctgtcgatgcgttctgcatccagttcattaatgataattgcgggtctggtcatctcatactccatgttatccaggaacctgtccgtaaaagaaaaccctcgccgaaaatggcaagggttaatgtcctctcatcatactgagacttgctggtggtttgaagtgattaaacgcacattcatcaacgaaccatagcggagttgtatgaaatctagccggctttatccagcagaaattgcttaccgcagttccccggatggggttggggtaagaatgaatcagcggagagaggggcattaatggccgctgctttgatggagatttgcatctcagtcagataggcggggttgccgttgcaggttaacttgaaagccctgacgttctgttttccataggcctcagcaaccgcggcgttgaagccatcccggctaacggtttgcccatagtgtttggccaggaaggcgcccagatggctctgttttatctcgccgttcaggcgcaccatggtgccgaaatagttgtcaggatcgaaaccaaagcaaacgccatgcttggcgtattcataacgttcgagacatgagttaccgcccgaacccggcatcacgccgttaagcttattcgccatttccagcgagagcccggtttcagccgcccgacatttttgcccggcttttgcttccggcatattgggaacagggcgggtcgcacagccaaagcgcatccagcgccgctcgtccaccccccgtgcggcaatagattttggcaggctcggccacaggccgtgaacggtgagaaaatcggctttattgctgagttcctgctgcaggcggcactcttccggttcgctgcggttgcggtcttgcatactttggcagaaccccgtttgccaggagagagccagcacgtagcggtcaaaatcaccgtattgcgtggcgatcagcggatctgcgctgacctgggcggcgctgagcaaaagggcaatggcaacgaaatccttcctgaacatttttattcctgatgacaaatggtcattgataacattgagttattaaagcataaaaaaggcgccaacaggcgccttttcacacggtttcagctttagcggattgcgctgccgggaaccagaacttcggtggcgataatcaccactaacaaaccaaccagcaccgggacagaggtccgtttcaccacttcaaacggcgaaatttttgccataccggccacggcgaccaccacgccggagaccggagaaatggttcggccaaggttagatgcctgcagcatcgggatcgagagataagctggattgatgccggaagagtgcgccagcttcgggatcatttcaacgaaagcatagaagggggcgttaccggaaccggtggtcatcgccgccagcatggtcagaatgaccagcaccagcatcagaatgatactggcggagccgaacgacgtggcgatagagatcagaccgttaataaagccaatggtactcagaccctgagcaaagacgccggcggctaccagcagcatcaccacaccggcaaacgcgtcagccatgccgcgatacgccgcttccaggccattgaacacatttttggtgttaaagccgcggcagaattccagaaccgccgccagcagcatgcagagcacaagaatggtgatgatgtgcagctccggtccccatttgccgtcgaaaatcagtacgccgattatcggcgtaaacggcagaatggcgtagaaagcgggggcggtcgtggttatctcgtttacatcgagcatttcatgggcgacgttttcttttttatccaggtagcgctgccagaaaaagtgagcgatcgccatgctgataatggccacaatagaaataggcagcgtggttttaaaggcaaagtcaatcagcggcatttcggcggctttggcggccagcacgacatccccggaagtgggggagagaataatcgccgccggtgaggcgcagatagcggcggcagcgccgcggctgatgcccacgttgaccatcaccgggaacagtgtcgccatcagcagtactcccagaccggtagcggaggagacggccagcgacatcaggcaggcaacgaaataagcggcgatcatcagtagatagggggagttaatgaagcgcagcggttttgacgccagcttcaccaccatgtcattggcgccgatgtgcgtcatataagtcgcgaaaccgcagagcatcatgatcatcatgccgaggtcgccgccgcggctcatcagcagtatcttaatatattcaacgatatcggttgctgaataaccggtgctctttgcgtcgcctggtaaaaccttatgccccatcagcgcgctggcgatgagtaatactaagccaccgacgaacagcacgccggtggcggaatagcctttaatgatatagcgggcgacgcccacaatgaccacaatcccaatcaggatctctactagcgtaagcattcttttacccctaaaccattaacccaaagaatctactaataaatgaagcgaagaaaaaatttagtgagggaatgtgcctaaaaaacgggcaaaactcgctgacgcaaatcaataaatcgatgagaatccctgtcaggcagtaatatgcccgcctggtcaaagcctgggcgcgagagattttcagattttttgcaccggataaatcaagagtttgcctaataccgttaaggtagtattaagattatctttgttatcttactccgctttaaaaatgatactggtaagagaaaagtgtaatgcgacgtcgatttatagggttgtttctgggatgcctgggcctgctgctatcatccacctccgctaatgcatcgtttagttcgacgcttcgcgacggctacaatacgctgagcgataacgtcgcgcagacctggaatgagcctgagcactatgatctttatatccccgcggtgacctggcacgcccgtttcgcctacgacaaagagaaaacggaccgctacaacgaacgtccctggggcgccggcttcggcgtctcgcgctgggatgataaagggaactggcatggcatctatttgatggcctttaaagactcttataataagtgggagcctatcggcggctatggctgggagaaaacctggcgtcccttagcagacgataatttccatctgggtttaggctatacgcttggcgtgacggcgcgcgataactggaactacatcccgattccggtcgtgctgcctctggcttctatcgggtacggcccggccacgttccagatgacctatatcccgggcacctataacaacggaaacgtttactttgcctgggcgcgcattcagttttgatgcgattttttatagcaataaaagagataagcggactgtcttgttgaaaaacaaagactaacgtgagcccggtgcaaaaagatagagacttttatcactttttagcaaagttgcgctggacaaaaggtaccacaattggtgtactgatacccgacacagtattagtgtcgattttttcatataaaggtaattttgatgtctaagattaaaggtaacgttaagtggtttaatgagtccaaaggattcggtttcattactccggaagatggcagcaaagatgtattcgtacatttctctgcaatccagtccaacggtttcaaaactctggctgaaggtcagcgcgtagagttcgaaatcactaacggtgccaaaggcccttctgctgcaaacgtaatgcctatctaagcaacgcgtcagtagaatataaaaacccgctcatggcgggtttttttttgcctgcggtcaggggctagcggctggccgcatgtgaaaacagccagaacgcggtggccgtcatggcaaatgagcctgacaagttgaccagtacgttgagtaacgcccagctaaagcgcccctgctggagtagaaacaccacttcggcggaaaacgtggagaaggtggtcagcccgccgcaaaagccggtggtgataagcagcttccacatcggatcgatatccgtcatgcggttaaaccatgccagccctgcgccgataataaaagcgcccagcaggttagcggtgagcgtaccaatggggatagcatgatgcatggggttaaacttcatacccagccaccagcgcaaaacgctgccggtgccgccgccaagaaacacagccaaaaggagttgcaacacggtcattccctgtttattgatcgagactaaacttcgagtgtagcgcgcgaaaggcctcactggctatgactaacctgacgggagagaaaagatgcttgttgctgccggacaatttgccgtaacgccggactggacggaaaacgcgcagacctgcgtgagcatgatgcgtcaggccgcggagcggggggccgcgcttctggttctcccggaagcgctgctggcgcgagacgataacgatgcggacttatcggttaaatccgcccagcgccttgatggcggctttctacggctcttgctggcagagagcgaaaacaacgccttgacgacggcgctgaccctgcatattccttccggcgaaggacgggcagcgaatacgctggtggcgctacgtcagggcaagattattgcgcaatatcagaaactgcatctgtatgatgctttcaatattcaggagtcccggctggtcgatgccgggcggcagattccgccgcttatcgaggtggatgggatgcgcgtcgggctgatgacctgctacgatttacgtttccctgagctggcgctgtcgttagcgctcagcggtgcgcagctcatcgtgttgcccgccgcgtgggtaaaagggccgctgaaggagcatcattgggcgacgctattagcggcgcgggccctggataccacctgttatcttgtcgccgccggggagtgcgggacgcgtaatatcggccagagtcgtattgtcgatcccttaggaacaacgcttgccggggcaggagagcggccgcagttgatttttgccgaattttcagctgattatattcagcaggtacgcgagcgtctgccggtgttgcagaatcgccgctttgcgccaccgcaattattatgacgtttttttaaacaaggcttgattcaccttgttacagattgctattgtgtccgcgcgtcaaatagccgttaattgtatgcgtgtatgatggcgtattcgcagcttgtattagagaagaaggttagctatgggtgagattagtattaccaaactgctggtagtcgcagcgctgattatcctggtgtttggtaccaaaaagttacgcacgctgggtggagacctgggctcggctatcaaaggctttaaaaaagccatgaacgatgacgatgacagtgcgaaaaagaccagtgctgaagaagcgccggcgcagaagctctctcataaagagtaattcgcgacgagtttcctgaacgagggggctcgctaccgacggggataaaccgcgtcggcaaagaggctgcagcgatagcgctgcggcctcttttgttatttgcactgagttttgacgaaaaagatgcaaccaactgttaccggggtgggatttttagcgggtaacgaaacgcatcggcagaacggaccgctgcgctaaaaatatcacgccgcggtcgaggcagagattacttcacttccatgcctttggcctgtagatcggcatgataggaggaacgaacgaacggcccgcaggcagcatgggtaaagcccatggccatcgcttcggctttcatctcttcgaactcatccgggctgacgtagcgctgtaccggcaggtggtggcggctcggctgtaaatactggcctaacgtcagcatggtgacgccgtggcggcgcagatcgcgcatcacttctacgatttcagcattggtttcgcctaaccccaccatcaggcccgatttcgtcgggatctccgggtgtgcttctttaaagcgttccagcagcttcagggaccagttgtagtcggctcccgggcggacctggcgatacaggcgcggcacgttttccaggttatggttaaacacgtccggcggcgtcgcctgaaggatttccagcgcacgatccatacggccgcggaagtccggcaccagggtttcaattttaatcgtcgggcttttttcgcgaatcgcgctgatgcagtcggcaaagtgctgagcgccgccatcgcgcagatcgtcgcgatccacggaagtcaccaccacatagcgcagcgccatatcggcgatggtttgcgccagcttttgcggttcattggcgtccggcgtcaccgggcgaccgtgggcaacatcgcagaacgggcaacgacgggtacagatggcgcccaggatcataaaggttgccgttccgtggttaaaacattccgcgaggttagggcaagaggcttcttcgcacacggagtgcaggccgttcttacgcatcgctgccttgatcccctggatacgggacgagtcagccggaagtttgattttcatccattccggttttctgagcagagcttcacgctcagttgccacgtttttcaccgggataagggccattttatcggcatcgcggtattttacaccgcgttccatcacaatgggtttactcatagcgtgcgtgttccagttgcgagtgacgaaggaaagcgaatcaattcaagtaaatgttgcatttatcaactatttttgaattaaacgcaggcagtatatcattgatacggggcataaagcagcctgctggccgggcaaattgtaaaatagttgttgttttatgcttttccctctcgtgccttatcggctaaaaagcctgacgaatcgtctctacgatctctttcagcaagggctcctgcgcgctgagcttgttatagtgcagcgcaatatcaattttttcttcccgcagcggcgggaaatcgagcatttttaagggccaaatcttctcgaccagggaaaacattccggaagtgattagccccagcatatcgctgtcgttgaccagggctgcttgagttaacagattgtagctgctgaaaccatagcggcgttcgccgagatgctcctccaggtgacgcaggattgtcgtatagcgctggccttcgggctgcaggagagcgaattcatattggctcaggtttgctgagtttgcggggagcgcgagggccggatgccctgcccggcagaagatatgtacgctatcctgaaatagcacatggtgcgtaatcgcctgcccgctgtgggggaagctgtcgaccagcaggtcaacctgacgctggtttaactggctggccgcgtcggtaatggcgacgttgtgcagcaaaatctggggaaagacgctccgcagctttttggtgataaccggcatgatcaacgcgccgatagccggggaggtggcaacggttattacccgttcccgctgcgtattgccggttaaatccagggcgttgagaaacgcctccatcccctggctgatatgcttatgcagatgcgtggcgtaggccgttggcgtcacgccctggcccttgcgaataaagagcgggtcagggaagagggcgcgcagtttgttcagggactgactaatcgccgacggcgtgatattcagtatttttgccgcgttgacgataccgttatggacgtaaaccgcttcaaaaatagtaagtaaattaaggtctatgttgcgcaaaatgcgaaacatctgacgatcgtagcgatcgtcaactcgttcggttggtacgctctgagcgttattttcttccactctgtatttccgctagtgatgattagcaccattatagcgttcacaattattttattagtgataattgattgcaaaaataaaggcttaatcgcgcctgagggataaatgtgacgtcccgcggtagcgggacgcgatggctagcggccttgaagatattccgcaggtggatcgttgagcaacgccagcagattggcggccaggcgtggagacacggtctccgtacgggcatcgggcaaccactggcgcatttgggtcatctccattccggcataaccgcaggggttaatcctcaggaatggtgacagatccatgttgatattcagcgccaggccgtggaatgagcaacctttgcggatgcgcaaacccagggagcagatttttcgatcgcccacgtagacgccgggggcgtctgctcgcgggtgcgattcaataccgtactccgccagggtgttcacgacggtttgctctaacagcgtgaccagctcgcgtacgcccagcttgcgccgtttcaggttcagcagaacgtacatcacctgctgtccgggaccatgataggtgacctgtccgccgcgatcgctctgaatcaccgggatctcgccgggaaccagaacatgttcggcctttccggcctgaccctgtgtgaacaccgggtaatgctctaccagccagatttcatccagcgtggcatcgtcgcgggtgtcggtaaattcatgcattgcctgcgagacaggttcgtaaggttgcaggccgagctggcggatgaggattttattgtgctgcaaaacaacgtctccgcagagagagaatgatttgagtggggaagtatatcacagcgagaaagcgagaatgacccggcgtggaggccgggtcaggggaagagatttacagcaccattcgtacgatttcaatattgcccagctcttcgtagagggtttctacctgctcaatatgggttgcattgatggtgatagacacagagtggtagttgcctttgctgctgggttttaccgtcggagagtaatcacctggtgcatggcgctgtaccacttcaaccacctggtcaaccagctccggcaacgcctgtcccattactttgtaagtaaatggagtagggaattcaagcagttcgttaagtttggttttcatgtcagctccggtgttacaacaaaaaataataactcccacgacgtgtgggagttatcaggataactagtatatggggatctaaatcacactttcaagtggtcgatttttaaccaaaccagtgatggaacattaatttaatgtaatcaatgattttaccgaagaaattgccttccgggatttcctgcagtacgaccagcgggcgctgatcgatcgttttgccatccagctggaagttaatggtgcctaccacctgatttttctgcagcggcgcgtgcagctcagcgttattcagcacgtagctggctttcagatctttcatgcgaccgcgcgggatagtcagataaacgtctttatccacgccgagcgaggcgcgatcggtatcgccaaaccaggcaggctcagaagcgaactctttaccggctttaatcggattaacggtttcaaagaagcggaagccccaggtcagcagctttttgctttcagactcgcggcctttgtaggtgcggccgcccatcacggcggagatcaggcgcatctggccttcggttgccgaggccacgaggttatagcccgctttgtcagtatggccggttttaatcccgtcgacgttcaggctgttatcccacagcagcccgttgcggttgagctgacgaataccgttgaaggtaaactctttttctttatagatggtgtattcattcgggacatcgcggatcagcgcctggccgataagcgccatgtcgcgcgcggagctgaactgaccatcggcatccaggccgtgtacggtctggaagtgggtgtttttcaggccaagggcgttaacgtagttgttcatcaggctgacgaaggcatcctggctgccggcgacgtagtcggccatcgccacgcaggcgtcgttgccggactgcaggttgatgccgcggatcagctgcgaaaccggcacttgcatacccggtttaaggaacatcagcgaggagcctttaaagaccgggttgccggtcgcccacgcgtcgttacccacggtgaccagatcggactctttaaacttgcccgctttcatggcctgaccaatcacgtagctggtcatcattttggtcaggctcgccggatcgcggcgggagtcggcgttgttttctgccaggactttgcctgagttgtaatcgataagaatccaggattcggcgtcaatctgcggggcgcctgggatcatcgttttgatattcaggtcatcggcgcgggcagcggaggacagcgctgccacggagagcgccgtaacgagtaagcgagcggtaaaagaggtcttcatggtctgaacaacggcatccgtgatggagttaaaaaaagtgccttactataacaaacgcactacgaaccagcatccgacattgcgcacgactttgttaatgactttgtcatgcgcaacaagcaggggaggcgggtgcgatgcctttagttggcgcgagtaataaatgactgcagctgagcttcgctttgcagacgctgttgaatcgtgctggcctgcgctttgctgctgaatgggccgagctgaatacgccataccgcgccgttttgcgtgacgcggcccgggacggaaaattgctgactcagacgctgctggtactgctgcgcgcgggcctggtcgctgacggcgccgacctgtacgacgaaatcgccgctggcgctggccgctgcggcaggcgctacggcagcggtggcggtcacggcgggcgcaacgctgccttgtactgaacccggggcggtaactggcgcgctttgaacgacaggctcgctgccttccagcacgccgttattcagcggcgtcggggcgccgaggaaaccgccgctgttgaccggcgcgccggtggtgtcttccggcttcagcgttgaattactgatggcgtgcacgtcagtttgcgcgggttgactcattgccgcgctgctgtcgccgtcaagattcgggcgggcgggcagcgcgtaggtctgtttggccacggtggtacaggccatacccggaccggaaagcgagccgtccggtgcgacgacgatcgggtcgatgcgcactttggtattgttcgaggtattcagacgatcggctgaggcgcgggacagtgaaatcacgcgatcgttaccgtaaggcccgcgatcgttaatgcgcacgacgatcatgcggccgttcgccaggttggtgatccgcgcgtagcttgggatcggcagcgtaggatgggccgcggtaagctgcgtgggatcgaacgcttctcccgatgcggtcagattgctgttaggctcggcatcgtagatggctgcgaagcctgcctgggtgaagttagacggatcctggacgattttgtagcttttgccgtcgcgttcataatcctgattcgccgtggcattaggcgtttcgtactgcggatcggcgccgctaatctccaccgttgggccattgcaaacggccggctgtggagtgctgaccgttttctgttgaacgtcttcactcgaacatgccgccagcagccctgctgctatgcagatccccagccattgcttacgcatcgcgaaccccttacacgcttttcgacaacatttttctgtgagtatggatcgacatgacgataccaaacccggccatcaatacgattagggcagagcccccgtagctgaccagcggcaaaggtacccccaccaccggtaaaataccacttaccataccaatatttacgaatacataaacgaataaaatcaacattaaaccaccggccatcacccggccaaaggtggtttgcgcctgggcggcaatccacaacccgcgcataatcagcagaatatagagcgccagcagaatcagtacgccgatcagccccagctcttccgccaggacggcaaagataaagtcggtatggcgctcaggcagaaactccagctgcgactgggttccgtgtagccagccttttccgcgcagtccgccggagccgatggcgatttttgactgaataatgtggtaacccgcgccgagcggatcggtttccgggtcgagcagcatcattacgcgctggcgctgataatcatgcatcaggaagaaccagaggatgggaataaaggcggcgaccagcaccacggcaataccaatcagacgccagctcaggccagacagaaagaggacaaacagaccggacagggcgaccagaatcgaggtcccgaggtcaggctgcgcggcgaccagcagcgtaggcaggaaaatcagcaccagcgcgatagcggtatttttcagcgatggcgggcaaacgtcgcggttgataaagcgcgccaccatcagcggtacggctattttggcgatttccgacggctggaaacggacgatgccgagatccagccagcgctgcgcccctttggagatggcgccgaaggcgtcaaccgccaccagcaggataatacaaaagatatagagatagggcgcccagccttcatagacccgcggcgggatttgcgccatgacgatcatgataacaatccccatggcgatctggccgattttgcgctccatcatgcccatgtcctgaccgctggcgctccagatcaccagcgcgctgtaggtcagcagcgccagcaggataagcagcatagtggggtcgaggtggattttatcccatagcgattttttatttggattatcagtcattattgatcctccccagccgttaccgccgggttttcactcggcagattggtgttgttatcacccagcattatatgatcgagaatctgacgcataatggtaccgactgccggacctgcgccgccgttctcaagaataatcgccacggcaacctgggggttgttgtaaggggcaaacgccgtcatcagtttatggtcacgcaggcgttcagcgattctgtgcgcgttataggtttcattggctttcaggccgaagacctgagcggtacccgacttggccgcaattttatacggcgcgctggcgaagtatttatgcgcggtaccgttgccgcggttggctacgccaaacatcccgtctttggcgatttcccaaaaaccggagtgaatatcgccgaccggcggttcatgcggctgaacccacggcaccggtttgccgtcctccaccgtgctctgcagcaggtgcggtactttaaccacgccgtcgttaatcaggatcatcagcgccttgttcatctggataggcgtcgccgtccagtagccctgtccgatgccgaccgggatagtatcgccctggtaccacggtttcttgaagcgcttgagcttccattcgcgggtcggcatattgccggagcgctcttccgccaggtcaacgccggtatagtggccatagccaaatttgcccatccactccgacaggcgatcgatgcccatgtcgtaggcgacctggtagaagtaggtgtcggccgactcctccagcgctttggtgacgttcagatggccgtggccccactttttccagtcgcggtagcgtttatccgagccgggaagctgccaccagccggggtcaaacaggctggtgttgcgggtaataaccccggcgctgagcgccgagacggccacgtatggcttaaccgtcgacgccggtgggtaaacgccctgagtcgcgcggttaaccagcggcgtattgggatcgttgaggagtccggagtagtctttgctggaaataccgtcaacgaacaggttgggatcgtagcttggcgtcgagaccagcgcgaggattgcgccggtgcgcgggtcggtgaccacgaccgccgcgcggctgccggccagcagcgtttcaatatactgctgtagcttcaggtcgagcgttaaatagatatcgcgcccggcctgcggcgggacctctttcagctggcgaatcacgcggccgcggttgttcacttcaacctcttcatagccggtttgcccgtgcaggacatcttcgtaatagcgctcgatgcccagcttgccgatatcgtgcgtggaggcgtagttagccagcttcccttctttatccaggcgatcgacgtctttatcgttaattttagagacgtagccgataacgtgggtcagggcggagttatagggatagtagcggcgcttatagcctttgacttccacgccgggaaaacggtactggttcaccgcgaaacgggcgacctgcacttcgctgaggttaactttcaccggaatagaggtaaagcggtgcgagcgggcgcgctcctttttaaagttcgccacatcgtcatcggtgaggtcgataacatcacgcagcgcatccagcgtttgctgaacgttgtcgaccttctccggcatcatctccagctggtaaatcgtacggttgagcgccagcggcgtgccgttgcgatcgtagataatgccgcggctcggcggaatcgggaccagcttgatgcggttttcgtttgaacgcgtttgatagtcggtgtaacgcacaatttgcacgttataaaggttggcgatcagtacgccggtaagcagcaaaatccccaaaaaagcgaccagcgcccggcgcacgaacagcgaggattcagccgtatagtcgcggaaagaattctgtaatttcattcgctgcttagtctaccctggtcatcattactcacggtggtaagggtggttggtggtaatgctccacgcccgatacagactctcggccaccagtacgcgaaccagcgggtgaggtagggtgagcgttgagagcgaccaactttgttccgccgccgctttgcaggcgggtgaaaggccttccgggccgccgataagcaggctaacgtcgcggccatcctgtttccagcgttccagttcgcgcgccagctgcggcgtatcccaaggtttccccggaatatccagggtgacgatgcggtttttgcctgcagccgccagcatcatttcaccttctttttcgagaatgcgcttgatgtcggcgtttttgccgcgtttaccggcgggaatttccaccagttcgaacggcatatcctttggaaaacggcgcagatattcgctaaagccggtctgaacccagtccggcattttggtgccaacggctaccaggtgcagcttcacgcgctaactccagagtttttccagctcgtacagacgacggctctcttcctgcataacgtgaaccataacgtcgccgagatcgaccacgatccagtccgcggcggcttcgccttcaacgcccagcggcagcatcccggcggcgcgagactcctgcacaacgtggtcggcaatggacataacatggcgcgtggaagtgcctgtgcagataaccatgcaatctgtaatgctggatttgccatgaacgtcaatggctacgatgtcctgacctttcaggtcatcaattttgtcgataacaaaatcctggagtgctttaccctgcaagagttccccctgggtgtgtgaagagtgataacaataaacagcctgacagtatacccgaactgttggcaaagtcgggataaatgtcgataaacgggcggtgaaggcggctatcatcccatccatcgccgatgattgcatcgccatttttgtaaaacaatttctgcaaagttcaaatggcggatgcagcctggctgcggagaataacagcctgctttgcactgtcaatggtctgcgcgcaattcttcttccgccagccaaacggcccggctatttagtacgcgcagcgtggtgaaatcaggctggagatcgacaaggctccacgcgccatgctcgatggggaagtgccacatcgccgaatccggcatattcagaagttgcgcgactaagaggctaagcacgccctgatggccgacgataagcagatggtcaagttcccgaaactgagagagggtgacggtaaagccgcggacgcgttcggcaaacgcctggaagccctccccgttggtgggcgccgcgtgctgccagtcggcgcaccatgcggcgtagttttcggcatcctcctgctgtaaatcgcggtggtggcgcatttcccagtcgccgaagaacatttcattgagcgcggcgaaggactggcgggggacgttacggtcgcccagcaggaggctggccgtgcgctgggtgcgctcaagctcactgcaaaacgcgcgctgaaacgggacggcaagcagccgctttcccagcgtttgcgcttgtctgattcctcgttcggttaacgcagtgggcgcgtgcccgctatagaggcccgcgacgttggcctcggtttcgccatgacgaactaaccataacttcatgatgaccctctcgaaaggagtctatgagactctccttgtggcaaggctagcagtagagcttctgctcatggatatagtcgagtacgctttccggcagcatgtccgcgcaggattcgccggattcaagacgctggcgaatcagggtggctgagatatcaaaccacggcgtttcggccaggtagataacccccgccgggctgctatgcatccgctcgacgtcatgagtgagatgtttgtccagccactgctgatcctgctcgcacgccatggtcagcggatagcccgggcgccggcaaacgatcagatgcacgttatcaagaatgctttcatagtcgtgccaggtggtaaaggtgagcagcgaatcctggccaataataaacgccagcgaccgttttggcccttgctcctggcgccactcgcgcagggtttgcgcggagtatgacggcgtgtcgcgcttgagttcgcgatcgtcgagaataaacagcggcttatccgcgatggccagctccagcatatgcctgcgttggtcgctggtggcttcgggctgcgggcggtgcggcggcacgttgttgggcacgatggtgacttgattaaggccaatctggttggccagaatttccaccggtttaaggtgaccataatgcaccggatcgaaggtgccgccgtacattgccagtaactgagtcatatcaaccatcaataaaaacgtctgccagcgctttatggcagagcaataaagagagactttccagctcgggccatacggagtgcccgtaatcctgcttgaaggtgagttcggcacgggtcagcaacgtgacggcctggcgcagctggtcggcgctgaggcgggccagcgcatcgctaaccagctggcggcggttctgccacacgcgatgtttgtcaaacagcgaacgcagcggcgtatgggccgactgccgcttcaggttgaccagcagcagcagctcgcgctgtagggtgcgcagcaggatggcgggctcgctgccttccagacgcagctgttgcagaacgtggagtacgcgcttacttttcccggccagcagcgcatcaacccagtgatagggggtgaaatgcgcggcatcattcaccgcctgctcaacccgcggcagcgtcagtttaccgtccggccacagcagcgacagacgctccagagcctgcgccagcgccagcagattaccttcatagcagtagcacagcagctgactggccgcgtcatcaagctgcagattattctgcttcgcgcgcgtggcgagccagcgcggcagctgggcatattccggcgtctggcagcttacctgcaccgcccggctggtcagcgccgtcatccacgcggcgttctcctgcgctttcgtcagcttattaccgcgaacgatgagcaataaatcgtcatgcagcatgccgacaagcgtcgcgagctgttcgttaattgccgcattagggccattatcgggcaggatgagcagcagcgtctggcggctggaaaacaggctcatggcctgacttaacgagaacagggcaggccagtcggtactggcatcaacggtggcggtgtgatgttcgataaagccctgggcggccgcggcttcgcggatggcgtcctggctttcctgcaacagcagcggatcgttgccaagcagcagataggccgcgcgcagcccttcagtgagctgcgcgcggagctgttccgggtacaaccgaatcatcagttacccagcgtggtggagacgcgattgccggaggttgaagcggctggggtcgtcgtgaccggcttctcatcctctttggtggcttcgacatccgcaacgtgtacgctcggcagcttacggatcagctgctccgcggctttgtcgtacatttcctgaacgatcatgtcctgctcggcatctttcgctaacgccgcctgcgggttatcgaagaacgagcggtagactttggtcgtgatgggatagatatcatggcctgggatcaggacgctggcatttaccgtcatcaccatctgatattccgcagtacggccgtcctggaaaatagatgctgtatctttctgaatggacgatgtctccagacgcagggaaggaatatccttgcgcagggtactgctatcgaccagttcaacgccgttcagacgcagctgattacggacagcacgacttaatggtccattgggatcgcccgactggaagatcatggttttcattgcggtcggaacctgcgtagtgctacgcaggtgccagccgcaaccggcggtgattaacaccgccaaagataacaacaatgttgccagatatcgcacgcttcctcctgcgcttagccaacgaccagattgagcagtttacccggaacgtagatcactttacgtacggtcacaccgtcgagatatttcgcgaccagatgctcctgacccgcgcgctcacgaacctgctcttcagttgcatccaccgcaacggtaattttaccacgaactttaccatttacctggaccacgaccagagtcgtgtcttcaaccattgcgctttcatcagcgaccggccacggcgtgttgtcaatatcgccttcgccgcccagctcctgccacagggtaaagctggcgtgcggggtgaacgggttgagcatgcgaaccacggccagcaaggcctcacgcatcagcgcgcgatcctgatcgttttcctgcggcgctttcgccagcttgttcatcagctccataatcgccgcaatcgcggtgttgaaggtctgacgacggccgatgtcatcggtcactttcgcgatggttttgtgcacgtcgcgacgcagcgctttttgatcttcgctgaggctggcaacgtccagcgcaggggcttcacccagggtggtgtgttcgtaaaccagtttccagacgcgtttcaggaagcggttcgcaccttccacgccggattcctgccactccagcgtcatgtcggccggagaagcgaacatcataaacaggcgcacggtgtccgcgccgtagcgttccaccatctcctgcgggtcgatgccgttgtttttcgacttggacatcttgctcatgccggtatagaccagctcgcgaccctgcggatcgaaggctttaacgatacgccctttctcgtcgcgctcggtggttgcctctttcggagagacccagttacgctcgccgttttcgccaacatagtagaaggcatctgccagcaccatgccctggcaaagcagctgtttagccggttcgtcagagttcaccatgcccgcgtcgcgcatcagcttgtggaagaagcggaaatagagcaggtgcataatggcgtgttcgatgccgccgatatagatatcgaccggcagccagtagttggccgcttccgggtcgagcataccctggtcgtactgcgggcaggtgtagcgcgcgtagtaccaggaggactccataaaggtgtcaaacgtatcggtttcgcgcagcgccggctggccgttaacggtggttttcgcccactcaggatcggctttgattgggctggtgatgccgtccatcacgacgtcttccggcagaataaccggcagctgatcttccggcgtcggcatcacggtaccgtcttcaagggtcaccattgggatcggcgcaccccagtagcgctgacgggaaacgccccagtcgcgcagacggtagttcactttacgttcgccgacgccaagagacgcgagcttatccgcgatggcattaaagccagcttcgtgatccagaccgtcgaattcgccggagttgaacagcacgcctttttcggtcagtgcctgttcggagagatcgggttcggagccatcagcggccaggatgaccggcttgatgttgagaccgtacttgctggcaaactcgtagtcgcgctgatcgtgacccggaacggccatcaccgcgccggtgccgtactccatcagcacaaagtttgccgcccataccgggatcgcttcgccggtcagcgggtgaatcgctttatagccggtatcgacgccttttttctccatggttgccatttcggcttcggcaactttggtattacggcattcgtcgataaacgtcgccagcgcggggttattggctgctgcctgctgcgccagcgggtgacccgcagcgacggccaggtaggtacagcccataaaggtgtccgggcgggtagtataaacggtcagcttgtcggcgtagtcgttaacgtcgaaggagatttcgacgccttcggagcggccaatccagttgcgctgcatggttttaacggtatctggccagtgatccaggttatccagatcgttcagcagctcgtcagcgtaggcggtgattttgataaaccactgcgggatctctttacgctcaactttcgtgtcgcagcgccagcagcagccgtcgataacctgttcattcgccagaacggtctgatcgttcgggcaccagtttaccgcggaggtttttttatagaccagcccctttttatacagctcggtgaagaacttctgctcccagcggtagtattccggggtgcaggttgccacttcacggctccagtcatagccgaagcccagctttttcagctggtttttcatgtaggcgatattgtcgtaggtccacggggccggagcggtgttgtttttcaccgcggcgccttccgcaggcagaccaaacgcatcccagccgataggctgcaggacatttttgcccaacatacgctggtaacgggaaatcacgtcgccgatggtatagttgcgcacgtggcccatgtgtagtcgaccagaaggatagggaagcatcgacaggcagtaatacttctctttgctctcgtcttcggtaacttcaaaggtacgcttctcgtcccagtgttgctggacttttgattctatctcttccgggcggtattgctcttgcatggcagccagtggtcctgttttcaatacagctacaaaatgtagccaatggatgtgttatttcagatcggcatagcatagcccaaacgccaacgtcaaaacagcctttcacacacttacagagatgaaagcggtggagaatatttcgtgactctgtgggttggctggcagagcaatccgcagataacgtctatcataagaagaagttaaccacaccggaggcgaaaagatgaacaaggttgctcaattctaccgagagctggtgtcgacgctcagcgagcggttacgcaatggagaacgcgatattgatgcgctggtggagcaggccagggtcaagattagccagtccggcgagttaacgcagagcgaaatcgagaatgtgatccgcgcagtcagacgcgacctggaagagttcgcgctcagttatgaagagagccaggatgagctgactgatagcgtctttatgcgggtgatcaaagagagcctgtggcaggagctggcggatattaccgataaaactcagcttgagtggcgcgaggtgttccaggatctcagccaccacggcgtctatcacagcggcgaagtcgtggggctcggcaatctggtgtgtgagaagtgccattaccatctgccggtttatacgccggatgtgctaccgcgttgtccaaaatgcgggcacgatcagttccagcgccggccattcgagccgtaaatacgcggtagatatctgcggagccttttacacaggcgttaagccagcccgagagccaatataaagcgcgttgatatattggccttcctttttaaagggcaggctaacccttcatcagtatgcataaaaatgctggtgccgaagcaccagcataaggtctttattaaaaagagaagcgcatcttcgatgataacgtcatgttaattgatagtgttaatggtcgcgctcttaaactgctgagtgccccccatttcactggcgtatttatgtgatgaatttaaaaccagattattagtggaaatcgtgcctttgccacaggttgccagattaaggaaaccgcagcgataccctccgttaaccactttttttgccgtcatggttaaagtgccgtcagccctgataagagaacggtttgtgatatcaccgtaattttgggtatccagcgtcatatttgatgagcttgaaatttcaccttcattataaagctcgtgataggttttaacgccaacattatactgaccaacaatagccccatagttgtgggtgacatagttatcaatagctattgtattcgccccgatgtagccttcattattaagcaggtagctttttgttgtcagcgtatcagcagcttccataaaactccctttttttaatgccagagtaccattggtttttatggtcacgttgccgccggaggtagtaccaaagttgctaatctccccggacgtcatctgttcatttttttgcgcctgaaccagcagagtatcgtagccaaaaatattgccagtgactttaagcgaatcccccccaaaggtcaccgttgtgtttttacttctggttgaacctccgttgtcaatattaccggcagcggtgactatcagctgattatctgaaagtaaactggaaccatacgttgttttcaggttaccgttagtcattacgttcaatgtggtggatgctttgaatttacccgtattttcgatatttccggatgcgttgactaataaatttcctgtgctggaaatggttccactattgcttatcgaactgaggctgttcagtagggtgatattattcgaggatatatttcccgtatttttaaaattgcctgcagagactacctgagtcatcataccattgctggcgatagagccttcgttggtgagtgagccaaagctggtcaaagagaggctggtgttagcaacaatagcgcctttatttcgaacgccaaaacctaaattattgccaaccatagtaatactattggctttgatgccaccaagattactaatgtcgatactatattcagggtaaagatactgcagcgccgttgctgatttacccgctgaggttatcgcgcctgagccgttatcaaacgtgaagtttcctgcacccactattgcgttctttgcattaaccgcaccgttaatggctatcgcatcggcgagcagtacagcatagctattgctcgcatccattccttttttgtcgatggacaacttgccaccggttacgtcatagctggcgatcgcgccagtatcagaaaaagtcacctttccggtcgttaaaatcgccttattggtgttaatgaaactacatcctgagcaggaaatgccattggggttagcaataacaacatcagcgcgttgacccgcgacttcaataaatccattcagtgagctggcacgatttgaggtgacttcgttaagaataacagaagcactaccattggtcagattgttatttttagcaatatttcctaaggtcccgtgtgtgagatcgctggtgctattgttaagaacgacacctttactatcaacgttaaactcacgatacatattatgtgagacgccggcggcattgggtttttcaatatcgatgaccttgacgcctgataaatgagtataggttgtcgggtcggcataaacgaaggttgagctcaaggctgctgctagcacaacataggataatttgaatttaaacatttaatatagtcctttaaaaataaatgaagttaaccgatacgttgaaaaactgactttaatacctccattgtaatgaaaaccccaggttcacagggtctgtatgaaaaccgtttggctttaccaacggtgttcccaggaaaaaatcatattgagtagcaataacgctcccgcgcactcccatactggcgccagatatgactttgccatttccgtactgttctgttcctgtaatgcgcccaacatctatgcctaagtacagctgttgttccggggcgggcatatcccagatgaaatcattgcgccagtaccagccttgatttcctgaaagggttctttcaccgtcaaagcctcgtaccgtccagcgattacctatattaaattgattatctacggataagatgtcgggactgatttgtatattgacatgtggggcatagctgaatttatctcccgtcaattcaaacttcattagggcttgaaggtcggcatgaataatgcgcgaaagcttactgtacagaccggctttttcctcaggggttggtactgaactgagccacggaaggctacgctgtacgcccaggctggcatctatgattgtatgagtaaaatatcgttgttgatgtacagtaatatcccaggcaggattctgtttgcgcataacgctcaattcactaccgccaaaatagtaatgtgaggtgcttttagatattcgcgcatcaacagtcgttttttgctgacgggtatgcgaaagtaaatgcgttaaggttgcgctggcataatcatttttgcttttatattcaatggtagagtatctaccattgaactgctgacgatattcactttgtgaaccgtaaagattgagcgaccaaaatccaaagggaatagaataatagaggcttttattctgattaccatcgttatgttgattaaactcgacatcgccccccatggataaatagagtatgtcatttagcgtcgtcaggtcgtaaagataaagcgcgccaccggcctggtaacgcccgctgctacggcttccggcatcatccagccatgcgcctacttgccagtttcgtgccagatgccgggatatttggatgtcgctttccgcattgttcttacccggcatgattttcatctgcgccgatgagccgggtaaacgctgtaagttagccattccctgttccagttcggttagcttcaggatatctcctgttttagccggtatggcattccacaggctggttgtcgcgctattgtcggaagcccagctaatattaccgatatagccatagctcaacgtgatgctcagaatgccatcattcagggactgtgaaggtacatcaataagcgacgtgatatatccccgggcaataagttcattttgcaaggttgtggtgagtagacgtatgccttcaatacccagacactttttttcagcctggcgagcgatattacctaacagaccgagggtcagcttgtggtcagcggaaataatttcaacatggttgatatatcgacaggttgcttccagtggaaaggcaagtttatatttttgcgatcctctacctgatgccgaatattcctgctgtgctggtgccaatgcgctttgacgtgccttatcctgttccacctgattggtattactaatcgatacattcgccaatgtcgacgcggttagcagaatataaagagaaagggcggttatgagacttttattattcacgaagcaatatccatttgtttcattcgtccgttatagccttgtcaagaatgtttagcgttcactgagtatggttaacgaagccgggtactcaatcttaagaatcttacttttctaaaatcaaaaaaaaacgctgccggtgctcagcgctgttgtcaaatctgcgccatgttatctacggcagattaggtaatccacgatgtaaagcgtgaatttttgttgaattgagcgtttcaggtcgtgaattatttggcgtgaggctggatatatttatgacgcgtatttgagagcaacgaaactattgccataactatggagagagacaggagcgggaagagataaaggcgtgtacggtaccgtacacgccggaaggttagtgcagaattttggcgaggaagtctttggcgcgttcagattgcgggttagcaaaaaacgcttctttatcggcgtcttcgacaatttttccttcatccataaagataacccggttggctaccttacgcgcaaagcccatttcatgggtgaccaccatcatagtcatcccttcgttcgccagttcaaccatgacgtccagcacttcgttaatcatctccggatccagcgcggaggtgggttcatcaaacagcatggcgataggatccatacacagcgcgcgggcgatggccacgcgctgctgttggccacccgagagctgggcggggaatttttcggcatgagcggaaagccccacgcgttccagcagcttaagcccttttgcccgggaggcggctttatcgcgattgagtaccttgacctgcgccagggtgaggttatcgataatcgataagtgagggaacagctcaaagtgctggaataccatcccgacgcgcgagcgcagtttggccaggttggtctttttatcgttgacggtggtgccgtcgacgatgatttgaccttgctgaatgggctcaaggccgtttacggttttaatcagcgttgatttacccgagcccgaaggcccgcagaccaccaccacttcgccttttttcacttccgtggagcaatcggtcagcacctgaaagtgaccataccattttgaaacatttttcagggtaatcattacacagtccttttcttcaaccagctgaccaacagcgatgcgctgagactaaacacaaaatatacggcgcctgcgaacaggatcatctctacctgggttccatcacgctcgccgatagtcgaggcggtgcggaaaaagtcggccaggctcaggacatagaccagcgaggtatcctgaaatagtacgatgccctgagtcagcagcagcggtaccatggcgcggaaggcctgcggcagaatcaccagcttcatggattgccagtgggtcatgcccagcgccagcgcggcgctggactggccgcgcgagatgctctgaatgccggcacggataatttccgagtaataggccgcttcaaacatggagaaggcgatcatcgctgaaatcaggcggatatcggttttcggcgacaggccaagcacgttctgcaggaacccgggaacaatcagataaaaccacagcagtaccatcaccagcggaatggagcggaaaacgttaacgtaggttttggcgaaccacgccagcggcaggaagctcgacaggcgcataacggccaggatcgtcccccacacaatcccgacaacaatcgcggtcacggtaatttttaaggtaatcaccagccctgccagcaggtatggcatggaaggaataatggagctccagtcaaaatcgtacattatttaccccccatattgcccggcaggcggaatttacgttcgaccacgtacatgatcagcataataacggcgttgataaacacgtaggcgagggtgatagcggtaaacgattcccaggcatgggccgagtagtccagcagcttacccgcctgcgcggccatatcggcaagaccaatggtggaggcgatggccgagtttttcaccaggttcatcatttcagaggtcattggcggcacgataacgcgataggcgttgggcagcagaacgtaacggtaggtttgcgggagcgttagccccatcgccagcccggcgtttttctggccgcgcggcagggattgaataccggaacgaacctgctcgcagacgcgcgcggcggtaaacaatcccagacacagcatcgaagaaacgaaaaactgaatattcggatccagctcggacttaaaccacatgccgatgttttccggcagcagttcaggcaccaccagataccaggtgaaaaattgaacgataagcggaacgttacgaaaaagttcaacgtagcaggtgccgatagtcgacagcagacggttcgggaccgtacggagaataccgaagagcgaacctacaaagaacgcgataatccaggccgttaccgacagggtgacggtgatctgaaaaccactccacagccagcctaaataggtggtgttgccgaacggggcctgttgcaggaatatcccccagttccagtctattgacataaatgactcctggaaaaaaaagggtagcagcgctaccctcgaagattgttgctcagcctgtttcggtattcgcggccgctggggaacgaccagccgccgtatagtctgtccgcgccgtagcaacaatcgggagggcaggattccccgccctttgtttttttaattagttaagagctttatcgttaggtgatttgaacagcgctttcatctcgtcagagagttcaaagttcatattcaggttctttggcggaataggatttttaaaccacttatcgaaccatttttcggcttcaccggaggtctgaacctgggcgaccgtctcatcgaccagcgttttgaactgcgggtcatctttgcgcagcatgcagccgtaggcttcctgagactgagcggtaccgacaatctcccagttatccggtttcttcgctttcgcacgttcgcccgccagcagcgcgtcatccatcataaaggccaccgcgcgaccgctttccagagtacggaaagagtcaccgtgatcttttgcgctgataatacgcatattcatttttttctcgtcgttcagcttgtgcagcagaatttcggaggtggtgccggaggtgacgacgacggctttatccttcagatccgggaaatctttaatcgcgccgccttttttcaccagcagacgggtaccgacgacgaaaatcgtatcggagaaggccgcctgtttctggcgctcaaggttgttggtggtggagccgcattcgaaatcatacgtgccgttttgcagcagcggaatacggttttgtgaggtaaccgggatcagtttgacctgcagatccggtttgttcagcttcttcttgatggcatcaacgatcgcattcgagtagtcctgggagtagccaacgacctgctgcttgttgtcatagtaagagaacggaacggatgattcacggtgaccaacgacgataacgccgtttttggcaattttatccagagtgctctggccagcggtggatgccgcatcttctgcatgcgccaccccagcggtgaggcccatgaccagcattgctgcggccagtttacgtaattgcatatccgactccttatcctcagcgccgtcagacgctattgatacccattgtgaatgtgtgtgcttttttatcgctgccgtctttgcgtgcagcatttgtatgtgtttgttagcatttagtttggcttaatgtaaagattttgctcttatattgttgatttttgcgaagcgcaccgcaccatttaaaggcaaaaatcccccattgcaccaaaatagcgccgcctgacgatcgatggtggtgcaaccgggttgtacccccgaggatcgcgttgcgacatgaatttattaagcaatggtcgtgccagaatggataagaaggggggatgaccgcggcgacgaatgccgccgcgggagaagcaattattgacggcgctggcgcaggctcatcagcagcgcagcaaagccaaacaaggcggttaacgcccacagcggccagttccccgtacgcgcgtacggcgtcagtcctgccgttggggtcactttggtggttaatacggcgcgggtgaactgtgggatcatctcctgtatttcaccgcgcgggccgatgaccgcggtaatgccgttattggtgctgcgcagcagcggacgggccagctccagcgcgcgcattcgcgccatctggaagtgctgccacgggccgatagatttgccgaaccatgcgtcattcgaaatagttaacagaaaatccgtatccgggcggaagttatcccgcacctgctcgccaagaatgatctcgtagcagatagccgccgtcagacgcatattatgcgccaccagctgcggctgcacgtacggcccgcggctgaaagaggacattggcaggtcgaagaacggcgccagcggacgcagaatcgattccagcggcacaaactcaccaaacggcaccagatgattcttgttgtagcgattctttgagtcgtagctgtacgggttatctttgcccagcgtaataatggtgttgtacgtatcgtagcgattgcgcgcgttcagacgcgcatcgacgatgccggtgatcagcgagctatttttcgaccgcatcaggtcatccatcatgctgaggaagcgctgctggttaatttccagatccggaatcgcggactccggccagacgatcagctgcgatttacccatatgcggctgggtgagatccagataggttttcagggtgttgagcagctgattctggtcccatttcatcgcctgggggatatcgccctgtaccagcgaaaccgtggtcgcgcgcgccggcagcggttgataccactgaatatagcgaagcgggaagggcagggcgaacagcaagacggcggcgatcagcggcttccagttacgctgcgcgatggccaataccagcaggccgctgacaagcatcagcaggaagttaatcgcctcaacgcccatcacgggagccaggcctttgagcgggccgtcaatctgactgtagccgaactgtagccacgggaagccggtgagcacccagccgcgcagaaattcgctgatttgccacaccaccggcgcggcgatagccacgcgtatccagctggtttttggccacaggcgcgaaagaatgccggcaaataatccggtatagagcgacagataggccgccagcagcaccaccaggaaaacgttgaccggaccgggcatgccgccgaactgcgcgatgctcacgtagacccagttaataccggagccgaacagccctaacccccaggaatagccaatcgcggcgctttgcaggggacgtcggttgagggttaaaccttgcaggccaattaacgaaataagggcagctggccagaagtcataaggtgaaaaagccagcgttccgctggctccgaataacagcgccagcagcaaacgtacgcgctggcgttcaataagagaggcaaataccatttaggttaatcgtcccgttggattagtcttccagcttcggctgcggggcatcatcaggaagctttacatgtacctgaataatacgtcgactgtcagccattgcgaccttgaattggtaaccatcaatgtcgatagactcgccgcgggcaggcagatgaccaaacgcctgcatgaccagaccgccgatggtgtcgacctcttcatcgctgaagtgggtgccgtacgcttcgttgaaatcttcgattgaggccagcgcgcgcaccgtccacgtgtggcggctcagctgacggaaatcgatatcttcttcttcgtcgtattcgtcttctatttcaccgacgatgagctcaaggatatcttcaatggtcaccagacctgagacgccgccaaactcatcgataacgatagccatatggtaacgttgggagcgaaactccttcagcatgcggtcaacccgcttgctctcgggcacgacaaccgccggacgcaacactttttccatgctgaaggcttcggcatcgctgcgcataaacggcagcagatctttggccatcagaatcccttcgatgtgatctttatcttcgctgatcaccgggaaacgcgagtgggccgattcgatgatgacatcgaggcactcgtccagcgtctggttgcgtttcagggtaatcatctgcgagcgggggatcatgatgtcgcgaacgcgctggtcggcgatatccattaccccttcgagcatatcgcgcgtatcttcgtcgataaggtcgttttgcccggaatcacggatcagcgccagcagttcgtcacgatttttgggttcaccgtgaaagagctggctgagtaacagggagaagaatccctttttgctgtttactgtgtcgctactgtgtgaattgtcgtcgctcatggcgtcgtatgggttctcatgttagttaaatagtcgctcgtcacgcgtatactcagcgcccggcatagcggccagtcgccggcaaagccggcaacgggttattccttctcggcaatgtacggatcctcatagcccagagcaagcattatctctgtttcgagggattccatctcttccgcttcttcatcaatgatgtggtcatagcccaaaagatgcaggctaccgtggaccaccatatgcgcccagtgcgcttccagcggtttaccttgctctttcgcttcctgttcaaccacctgacggcagatgaccaggtcgccaagcagcggcatttcgatacccggcggggcttcgaacgggaaagagagcacgttagtcggtttgtccttcccgcgataggtcaggttcagctcgtggctttccgcttcatcaaccaggcgaatcgtcagctccgactcttcctgaaactgcgggataacgctatcgacccagcgctgaaacagggcttcatccggcattccgctgttatcttcgcaagccagctgtaaatcgagaatgacctgactcatttatgctcctgttcctgggcttcgcgtttgcgctcggcggccagttctgctttacgtttctggtctgcttcttcccaggcttcataggcgttaacgatgcgggcgacaaccgggtggcgcacgacgtcttcgctatggaagaagttgaagctgatctcatcgacttccgccagcacttcaatcgcatggcgcaggcccgatttggtgctgcgcggcaggtcaatctgcgtgacgtcgccggtaatgaccgccttagagttaaagccgatacgggtcaggaacattttcatctgttcaatggtcgtgttctggctttcgtcgagaatgataaacgcatcgttcagcgtacggccgcgcatataggccagcggcgcgacttcaatcacgttgcgctcaatcaacttttcgactttctcgaagccgagcatctcgaacagcgcgtcgtacaggggccgcaggtacggatcgactttctggctcaaatcgccgggcaggaagcccagtttttcgccggcctcaaccgccggacgggtcagaagaatacggcggatctcctggcgctccagcgcgtctaccgcggcggcgaccgccaggtaggttttcccggtcccggcaggaccgacgccgaaggtaatgtcgtggtcaagaatattggcgatgtactgcgcctgattcggcgtacgcggtttaatcacgccgcgcttggttttgatattgatggccttaccgtagtccggcacgctttcggcgctctgctccagcacgcgggcttctttgatcgccagatgaatttgttccggttcaatatcctgaatttcgccgcgcatcggcgcggtatcgacgtacagactgcgcaggatatccgccgcagcggtgacgcaaatcggccgaccggtcagtttaaagtggttgtcacgacggttaatctcgatgccgaggcggcgttccagctgtttaatgttgtcatcaaacgggccgcacaggctcagcagacgggcgttgtccgcgggctcaagggtgatttcgcgagtgtctgtattcaagctgttcctcttatacatagatagccggaaggtagccggtcaggaaattattcacgtcatcggaatatggcgcaagcatcgctatagatattgggttcaggagaggaaatacaaggcctgccggagccggcaggcctgaacggattatggctggtagataccgacgccaagatcgttttctttacgggtgcgggcaattaccgactccggggtttccgcgatgcgcagacccatttcgtcctcggtgcgcaccactttaccgcgcagggagtttgtccagacgtcggtgatctcgacatcgacaaacttgccgatcatctcaggcgagccttcgaagttcaccacgcggttattttcggtgcggccagacagctccatgatgctcttacgtgaggtaccttccaccagaatgcgctgcacggtgccgagcatacggcggctccaggccatcgcctgctggttgatgcgctcctgcagaatatacaaacgctgcttcttgtcctcttccggtacgtcgtcaaccatatcggccgccggcgttcccggacgcgcggagaagatgaagctgtagctcatatcgaaattcacatcggcaatcagcttcatggtctgctcgaaatcctgggtggtttcgccagggaagccgacgatgaagtcggagctgatctgaatatccggacgcgccgcgcgcagtttgcggataatcgctttatattccagcgccgtgtgggttcggcccatcaggttcagcacgcggtcggaaccgctctgcaccggcaggtgcaggaagctgaccagctccggcgtatcgcggtaaacctcaatgatatcgtcggtgaactcgatgggatggctggtggtaaagcggatccggtcgataccgtcgatcgccgcaaccagacgcaggagatcggcaaagctaccggtggtgccgtcatagttttccccgcgccaggcgtttacgttctgcccgagcaggttgacttcacggacgccctgagccgcaagctgggcgatttcaaacaggatatcgtcgcttgggcggctcacttcctcaccgcgggtgtaaggcaccacgcagtaggtgcagtacttgttgcagccttccatgatggaaacaaaggcgcttgggccttcggcgcgcggttccggcaggcggtcgaatttttcgatttccgggaagctgatatcgacgaccgggctgcggttgcctcgtaccgagttgatcatttccggcagacggtgcagggtctgcggcccaaaaataatatcgacgtagtgggcgcgctggcgaatatggtcgccttcctgagaggctacgcagccgccaacgccgatgatcaggttgggattcttctctttcagcagcttccagcgtcctagctgatggaatactttttcctgagccttctcacggattgagcaggtattgagcagcagcacatccgcttcttccgccacttcagtgagttgatacccgtgggtggcatccagcagatcggccatctttgatgaatcgtattcgttcatctgacagccccaggttttaatatggagtttttttgtcatcgacttgctcatgcttaattaggtatacccaaagtcagcgtcttcaccggatgttgctctgcaatgtgaagggtgacggatataaagccaggattgcagggcgcgtattgtaatgctttgaccgcgccctgaccagtacgaccgtaatcaccacaagccgaataaaaatccggtaaactgaggggattcgggtttaaggataatagccatgacaattcatgcaacagatgtcgttatcgtcggcggcgggatggttggcggcgccctcgcgcttggcctggcgcagcagggctttacggtgacggtcattgaaaaaaacgcgccaccggtttttgatgcgtcttcaccgcctgacgtgcgtatttcggcaatcagcgcgtcatcggtagggctgctgagaggcctcggcgtctgggacagcgtgcggtccatgcgcgcccatgcgtaccgccagctagaaacctgggagtgggaaagcgcgcatgttgtcttcaacgccgcggagctgaagctgccggaactgggctatatggtggagaataacgtcctgcagcgagccctgtggcaggcgctggaagcccatgagcgcatatcgctgcaggtgggaacatcgctccaggagatgcgtctggaagaaacgtacgcctccttaacgctgaccgacggcagccagcttgatgcgcggctggtggtgggcgcggacggtgccagttcgcaggtgcgtcagctggccggaatcggcatccacgcgtggcagtaccagcaatcctgtatgttgatcagcgtacagtgtgcggacgatcccggcgacagcacctggcagcagttcactccggcggggccgcgcgcgtttttaccgctgttcgatcattgggcctcgctggtgtggtacgacgcgccggcgcggatccgccagctgcagggcatgagtatggctcagctacagcaggaaattactcgccacttcccgtcgcggctgggagagattacgccgctgagtgcgggcgccttcccgctcacccgccgtcacgcattgcagtatgttaagccggggctggcgctggtgggcgatgctgcgcacaccattcatccgctggcggggcagggggttaacctcggctatcgcgatgtcgatgcgctgctcgatattcttggcagagcaaaagcccgcggcgaagagtgggcccgcctggcggtacttaagcgctaccagacgcgccgtcaggcggacaactttattatgcagtctgggatggatctgttttacgccgggtttagcaacgatctgcccccggtgcgtatgctgagaaatattgggctgatggcggccgagcgcgccggcggactgaagcgtcaggcgttgaaatacgcgttgggattgtaacgctggacgacccggctggcgaaggcgcggccgggtagggatgctaatagacgtagccaaaatccataaagcaaaaagcccgccgaagcgagctttttgctttatgttggctggggtacgaggattcgaacctcggaatgccggaatcagaatccggtgccttaccgcttggcgataccccaattttacgttgaccatttcgtaccggggtcaaaccggtggcttagcgcctggagatactccaacgggtgcgcgcacagcgtgggcgacttttaaaattggctggggtacgaggattcgaacctcggaatgctggtatcagaaaccagagccttaccgcttggcgataccccaacaattcttttggatttatcgaactgaatcaataattcctttgtatggtggctacgacgggattcgaacctgtgaccccatcattatgagtgatgtgctctaaccagctgagctacgtagccaaaatcttactctattttcgatggctggggtacctggattcgaaccagggaatgccggtatcaaaaaccggtgccttaccgcttggcgataccccaataccgtcgcggtgaaccgcaaacatcgaaaatatggctggggtacctggattcgaaccagggaatgccggtatcaaaaaccggtgccttaccgcttggcgataccccaacaaaaatcttttaccgcaacgcgaacgagtaaatggtgcgggaggcgagacttgaactcgcacaccttgcggcgccagaacctaaatctggtgcgtctaccaatttcgccactcccgcaaaaaagatggtggctacgacgggatttgaacctgtgaccccatcattatgagtgatgtgctctaaccagctgagctacgtagccatctttttgcgcgttaccttatcggcgttgcggggcgcattatgcgtattgagccttgaagcgtcaacccctttttcatcgaaaatggactgaacgtaactgtttggttaggttgcgaacagcgtggtgcaataatcggcaattattggttatttatcgtttttaacggcttaaataaggcacaaaacaaaaacggaccccgaagagtccgttttgaaaacagcgtcggttagtaggccgactggtgtacgccaaccgcgcgtcccgacggatcgttcatttttttgaaagattcgtcccactcaatcgcttttgctgaagagcatgcgacggaagggccgccaggaacgcattcggccgcgctcggtaccgggaacagctcttcgaaaatctcacggtacagatacgcttctttcgaggaaggcgtgttgtacgggaaacggaagccggcggtttccagctgccgatcggaaatctgttcagcggccacttcttttaaggtatcgatccagctgtaaccaacgccatcagagaactgttctttctggcgccaggcgacgctcgccggcaggtaagattcaaaacattcacgcaggacatgtttttccattttaccgttgccgcacattttatcctgcgggttaatacgcattgccacgtcgaggaatttcttatccaggaacgggacgcgcgcttcaacgccccaggcggacatcgctttgttggcgcgagcacagtcaaacatatgcagcgcctgcagtttgcgcacggtctcttcgtgcagctctttggcgttgggcgctttatggaaatagaggtagccgccaaatacttcgtcagaaccttcgccggacagtaccattttgatgcccatggctttgattttacgcgacatcagatacattggcgttgacgcgcgaatcgtcgtcacgtcgtaggtttcaatgtgatagataacatcgcgaatcgcgtccaggccttcctgcaccgtaaagtggatctcgtggtgcacggtacccagatggttagccacttcctgcgcggctttcagatcgggggcgccctccaggccgacggcgaaggagtgcagctgcggccaccaggcttctgatttttcctgatcttcgacgcggcgcgcggcatattttttggtgatggcggaaatcaccgatgaatccaggccgccggagagcagtacgccgtacggaacatcggacatcaggtggctttttaccgactcttccagcgcctgacgcagttcgtttttgtccgtgacgttgtctttcaccgcgtcgtagtcgaaccagtcgcgctggtagtactcgcggatttcgccatctttgctccacaggtagctgcctgccgggaactctttaatcgtgcggcaaaccggaaccagcgctttcatttcagaggcaacgtagaagttaccgtgttcgtcgtgacccatatacagcgggatgatgccgatgtggtcgcgaccaatcagatacgcgtctttttcgctgtcgtagagagcgaaagcaaacatcccctgcagatcgtcgaggaagtccgggcctttttcctgatacagcgcgaggataacttcgcagtcggaaccggtctggaacgcgtagcggtcgccgtattccgcgcgcagcgcctggtggttgtagatttcaccgttgacggcgagagcgtgagttttagcggcgttatacagcggctgcgcgccggcgttgacgtcgacgattgacaggcgttcatgcgccaggatggctttatcacaggcatagacgccggaccagtccggaccacggtggcgcatcagtcgggaaagctccagtgcctttttacgcagctcacccgcgtcagttttaatatccagtacgccaaaaatcgaacacatagccttctccgttaccctgtcttgtttgatgttgtgcagacttcgtcttattgcgaagcctcagtgcatgctttagaaaatgccgcaaaggcgcggagggcgcaaggggtttacggctggaaaaggaaataatgcaattgtgattgtcgaatagtgaaaaaagagtacgttttgagcgcttttgttgctgaatatttagtgatggcgctttttttttagataaaagcgttcaggagaggcttaggaataagaaaccacgtcgcaggacgtggttttattgtcatccctaaaccacctcctagggaggtggtgattgctcctgtaaggctatagcctgaagaatgcccatgtcggaatatctctgcttactcaccacaagtaaaaggagacaaaccgacatgggactttacaggagttcatcacatgtatattggcgttgcaaataccacatagtctggacacccaagtaccgattcaggatcctgaaagataagctgggtaaggagctgtacaggacgatctatatcctctgtggaataaaggattgtgaggttctggagctaaatgttcagcccgatcatgtacatctggtcgtcatcattccaccaaagatctcgatatcaactctgatgggccatctaaaaggacgcagtgccatcaggctttataaccgttttccacatatcaggaagaagctatgggggaatcatttttggtcgcgaggctactttgtcgatacggtgggagtgaatgaagaaattatcagacgatatgtgaggcatcaggagaaaacggaacaaacgtatgaacagcagatggaattgctagagtaatcagcggcaggtgacaatagccccccttacagggggcattctcaaaagccaccttctcagaaggtggtcttttacttagaagatatcgatttccgcaacggagggataaatccaggaagggcggaacggcatgctgtcgatatcatcgagcgtggcaaccccggaaagcaccagaatggtttccagaccggcctggaagcctgccagaatatccgttcgcaggttatcgccgacgattaccgtctgttccgaatgcgcctgcattttattgagcgcggagcggataatccacgggctcggtttccccacgtagaacggcttacgaccggagattttttctataccggcgcacagcgccccgcaggccgggtagtagccgcgaccgtgggtatccgggttagtggcgataaagcgcgcgccgttggcgacaaaaaaagcggccttatgcatcatctcccagttaaaggagcgcgtctcaccgacgataacaaaatccggattgacgtcggtgatggtaaagccggctttgtacagttcgtgaatcagcgcgccttccccgaccacataggcttttttgccttcctggcgacgcagaaaatccgccgtggccattgctgaggtataaaaggcggtatcaggaacatcgattcccgccgtcgcaaagcggtttgccagatcctgaccggtttgagaagggtagttggtcagcatcaccagcggcatctctttctcaagtatgcgtttgatgaattcagcggcgcccggcacggccacattgtcgtgcatcagcacgccgtcaatatcacaaattacgttttgaatggtcatgaactgtccgacatcgttggagaaaggcgaaactataaagcggctttagctttccagcaaacgctggagcagagtcccgttgagcatcgcacgctttaccaaggcaaaagcgccaatggctgagcgatgatcgagcgtggatcgcactaccggcaggtttttgcgaaacgccttcagcgcctgggtattaatacagccttcgattgccggcagaaggactttttccgcttccacgatctccccggcaatcaccaccttttgcggattaaacaggttaatggcgatagcgatggttttacccagatggcggccaacgtgctcgatcacctcacaggccagcgcatcgcctttattcgcggctttgcagatcgttttgatcgaacagtcatcgagggaaattttgctctgataaccctgttccagcagatgacgaacgcgatgttcaatagcggcattggcggcgacggtttccagacagccgaagttaccgcagtggcagcgctcgcctaacgggtcgacctggatatggccgatttccccgacgttaccgttacggccaataaaaatccgcccgttggagatgatccctgcgccggtcccgcggtgtacgcgcaccagaatggagtcttcacagtcgtggctcgcaccaaagtagtgctccgccagcgcgaggctacgaatatcgtggccgacgtagcaggtaactttaaagcgtttttccagcgcttcaaccagcccccagttttccacctgaatgtgcggcatatagcgaatgacgccgctttccggatcgaccagccccggcaggatcaccgaaatggcgatcagctcgcggattttacgctgacagctctccataaaggcggcgatgatgttaagcagggcgtgttccagcgtttcctgagttctttccggcagcgggtagtgctcttcttcaagagtcttgctgcttaaatcatagagggtcagggtggcgtcgtagcggccaaggcgtacgccgatggcgtggaagccgcgggtttcggcaacaatggagatggcgcggcggcccccggtggaggcctgctgatcgacttctttgatcagtccgcgttcaataagctgacgcgtaattttagttacgctggcaggggcaagctggctttgttccgcaatctggatacgcgagatggggccgtgctgatcgatgagccgatagacggccgcgctgttcagctgttttacgagatcgacgttaccaatttgagcctgtccgcctgctgtcatacttttacttactcagtgacgacctcgttaccattaacgatggtcttggtgattttataatcacgggtgaatgcggtcaggttagcgaccatccccggggcaatgctgcctaactgtttgtctacgccaatggcgcgggaagggtagagcgtcgccatacgcaacacttcatccagcgcgatgccgcaatgctcaacgaggttacgcaccccttcaatcatggtcaatgaagagccgctgagggtaccgttctcatctacgcacaggccgttccggtagtatattgttttaccggcaaaaatgaactgctcaatattggcacccgccggcgccgtcgcgtcggtaaccagacacagcttgtcgcctttcaagcgtttagcgaggcgcacgttagcgaaatcgacgtgcataccgtcgacgatgatgccgcagtagacatccggctcgtcgaaaatcgcgccagccaggcccggctcacggccggtaatatacggcatggcgttaaacagatgggtagcaaaggtaatcccggcgcggaaaccgattttcgcttctttaagcgtcgcgttggagtgaccggcggagacgatgataccggcggccaccagtttgcggataacctccggttccacccgttccggcgcaagcgtgattttggttatcacgtccgcgttttcgcacaggaaatccaccagcgcggcatccggtttgcgtacgtagtccgggttgtgggtaccttttttaacgatattcagccacgggccttcaagatgcagccccagcgcctggttaggatgtttttgcaggtattcgcgcatcacgcgtacgccctgtttcatcaggtcgtcgctggaggtgatcagcgtgggcagatagctggtgcagccggagcgttcattggccttctgcataatctccagcgtttcaacggtgaccgcgtccgccgtgtcgttgaactgcacgccgccgcagccgttaagctggacgtcgataaaaccgggggcaaggatcgcgccatcaaccgagcgctgttcgatcccggtgggcagttcagtctgaggacagatacgttcgataaggccattggcgataacaatcgcatggtcatccagaatttcgtgaccggtataaatccggccttgggttaatgcatacattacgacccccggttgtcaaaaatggttgtcccgcgggggcagccgcgggacgagactacattacagacctttgatattttcggcttctaactcgttgaaatatttcagtgtcttaactttcagttccatggtggacggctcatcgcagaccaccaccgctttcgggtgcagctgcagacaggtaatggtccacatatggtttacgttgccttccaccgccgcctgcagcgccagcgctttctgatgacccagcaccagaatcatcacttcctccgcgtccagcagcgtgcccacgccaacggtcagcgcgtacttaggcacctggtcaacgtcaccgtcgaagaaacgggaattcgctacgcgagtatcatgggtcagggttttgatgcgtgtacgtgaagccaaagaagaggctggttcgttaaaagcgatgtggccatcgttacccacgccgcccataaacaggtggattttaccgtaagaacgaattttttcttcatagcgacggcattctgcatcaatatccggcgcgttaccattcagcaggttaatattttccgccgggatatcaacgtgatcaaagaagttgcgatgcataaagctatgatagctttccggatgctctttcggcagcccaacgtactcatccatgttgaaggtgacaacatgcttaaagctaacctggcctgctttgtgcatctcaaccagggctttataagcggtcagaggcgtaccgccggtaggcaggcccaggacaaacggacggtccgcagtcggtttgaacgcattgatgcggttaacgatatgccgggcagcccatttaccgacttgttcagctgttaccagggggatcagtctcattgttcacctctatagttaaattagaacctggcggattggcgccagcatactattaagagtatcgcagcaactgcgccgagcggggtcaatccgtgttgattttttgaatgataaaataagttttcgttgttagccagtcaaaggcggaggtgaatacgatatttggtgactattgtcacaaaaaatacccatttaatttgcgagacgaattaatttttcagacactttgcaggtaagttaaaaatttaaccaggttacacaataataaagtgactttaatgagccttatcggggtctcatagggggaataagatgaatattttaggtttttttcagcgactcggtagggcgttacagctccctatcgcagtgctgccggtcgcggcgctgctgctgcgattcggtcaaccggatctgcttaacatttcgtttatcgcccaggcgggcggggcaatctttgacaacctggcgctgattttcgctatcggcgtcgcatccagctggtcgaaagacagcgccggtgccgcagcgctggcgggggcggtaggttacttcgtgttgacgaaagcgatggtcactatcaacccggccatcaatatgggcgtcctggcgggtatcattaccggtctggttggcggtgccgtctataaccgctggtcgggtatcaaactgcctgacttcctgagcttcttcggcggcaaacgctttgtacctatcgcaaccggcttcttctgcctggtgctggcagccatcttcggctacgtctggccgccggtgcagaacgccatccatgcaggtggtgaatggattgtgggcgcgggcgcgctcggctccggtatctttggtttcatcaaccgtctgctgatcccgacgggtctgcatcaggtgctgaacaccatcgcctggttccagattggtgaattcaccaacgccgctggcgccgtgttccacggtgatatcaaccgcttctatgcgggtgacggcaccgcggggatgttcatgtccggcttcttcccgatcatgatgttcggtctgccgggtgcggcgctggcgatgtatttcgcggccccgaaagcgcgtcgtccgatggtcggcggtatgctgctgtcggttgctatcaccgcgttcctgaccggtgtgactgagccgctggaattcctgttcatgttcctggcgccgctgctgtatctcctgcacgccatcctgaccggtatcagcctgttcgttgcgacggcgctgggtatccacgcgggcttctctttctccgcaggcgccatcgactatgtgctgatgtacagcctgccggcagccagtaaaaacgtctggatgctgattgtgatgggcgttgtgttctttgttatctacttcctgttgttcagcgcggtaatccgcatgttcaatctgaaaacgccgggtcgtgaagataaagcggatgacgtggtcactgaagaggccaacagcaataccgaagaaggtttaacccagctggcgaccaactacatcgcggcggtcggcggtacggataacctgaaagcgattgatgcctgtattacccgtctgcgtctgaccgtggcggactctgcgctggttaacgacgcggcctgtaagcgcctcggcgcttccggtgtggttaaactgaacaagcagaccatccaggttatcgtgggtgcgaaagccgaatccgtcggcgatgaaatgaagaaagtagttgcccgtggcccggttgccgcggcggctggagcgcctcacagcgcccccgtagccgctcaggccgctaaaccgcaggctgtcgctaacgcgaaaaccgtcgaagcgctggtttcgccgattaccggcgacattgtagcgctggagcaggtcccggatgaagcgttcgccagcaaagccgtcggcgacggcgtggcggtgaaaccgactgataagattgttgttgcgccggcggctggcaccgtggtgaagattttcaacaccaaccatgctttctgtctggaaactgaaaacggtgcggaaatcgttgtccatatgggtatcgataccgtcgcgcttaacggccagggctttaaacgtctggtggaagagggcgcggaagtgaaagcgggtcagccgattctggaactggatcttgcgttcctgaacgctaacgcgcgctcgatgattagcccggtcgtatgcagcaatagcgacgactacagcgcgctggttatccaggcaaccggtaaagtggttgctggccagacgccgctgtacgaaattaaaggcaaataagactcctgagtggcgtttatgcctcagcggcgcagcgaaacctgcgccgcttttttttaccgcaaacacccccataatctccttccgatcgctattttgcgtaactaatagttgtctctacgccctgcttgtaagatcatgtgccgttatacgttgtttacgctttgaggaacccacgatgagtgaggcagaagcccgcccgactaactttattcgtcagatcattgatgaagatctggctactggtaagcacaccaccgttcatacccgttttccaccggaaccgaacggctatctgcacattggccacgcgaagtctatttgcctgaactttggtatcgctcaggattaccagggccaatgcaacctgcgtttcgatgacaccaacccggtgaaggaagatatcgaatacgttgagtcgattaaaaacgacgtgcagtggttaggtttccactggtccggggatgtttgctactcgtctgattatttcgatcagctgcaccagtatgcggttgaactgatcaataaaggtctggcctacgttgacgaactgtcagcggaagagatccgtgagtaccgcggcacgctgaaagagccgggtaaaaatagcccgtaccgcgatcgcagcgtggaagagaacctggcgctgtttgaaaaaatgcgcagcggtggatttgccgaaggtaaagcctgcctgcgcgcgaaaatcgatatggcctctccgtttatcgtgatgcgcgatccggtgctgtaccgcattaagtttgccgaccatcaccagaccggaagcaagtggtgcatctacccgatgtacgactttacccactgcatcagcgatgcgctggaagggattacccactcgctgtgtactctcgagttccaggataaccgccgcctgtacgattgggtgctggataacatcagcatccccgtgcatccgcgccagtatgaattctcgcgcctcaacctcgaatacaccgtgatgtccaagcgtaagctgaatcagctggtgaccgagaagcacgttgagggctgggatgacccgcgtatgccgaccatttccggtctgcgccgtcgcggctataccgctgaatccatccgcgagttctgcaaacgcatcggcgtgaccaagcaggacaacaccatcgaaatcgcttcgctggaatcctgcatccgtgaagatctgaacgaaaacgccccgcgcgcgatggccgttatcgacccggttaagctggttatcgaaaactatccgcagggcggcagcgaaatcgtgaccatgccgaatcatccgaataaaccggagatgggcagccgcgaggtgccgttcagcggcgaaatctggatcgatcgcgccgacttccgcgaagaagcgaacaagcagtacaagcgtctggtgctgggcaaagaagttcgcctgcgtaacgcttacgtgatcaaagcggagcgcgtggagaaagatgcggaaggcaacatcaccactatcttctgcacctacgatgccgataccctgagcaaagatccagccgacggccgcaaggtgaagggcgtgattcactgggtgagcgcggcgcacgcgctgccggtagaaatccgcctgtacgatcgcctgttcagcgtaccgaacccgggcgcggcggaggacttcctctcggtgatgaacccggaatcgctggtgatcaaacagggttttgccgagccgagcctggcgcaggcgcagccggaaaaagcgtatcagttcgagcgcgaagggtatttctgcctggatagccgctatgcaaccgcaaccaatctggtgtttaaccgcaccgtcggtctgcgcgacacatgggcgaaagtcggcgcgtagctacccgccgttattgagaacgccgcttactgcggcgttttttttattcagaatcagagaattaaatcctcatattttcgcgatgcgaattaatcttgtttacagattgtaataaccgcttttattaactctttccatccattgcatataaatatgtaatcgctttcatttcccctaattttctctttttttgcaagcatttcacccgccaaacgtgtgacatctacgactgaaacaaaaagacataaattatgtgcgctttgtcataatcttcatctttggtcggcgaaagagattgataattcgcgtcacgaaaaatagtctatacccagtggttatgcgaatttttaccgcaccactttttaagcagtcttattttatttttttgcgtgttgcctttggtaaccgcacttttaaaacgtcaaagaggatatgcatatgcgtacgtttagtggcaaacgtagtacgctggcgctggctattgctggtgtcacagccctgtcaggatttgcaatggtgccggatgcaaaagcagaagggttcattgatgattcaacgttaaccggcggcatctattactggcagcgtgagcgcgaccgtaaagatgtgaccgacggcgataaatataaaactaacctgtcgcactccacctggaacgccaacctcgacttccagtccggctatgccgccgacatgttcggtattgacgttgctgcctttaccgccatcgaaatgggcgaaagcagcgagagcggtcacccgaacgaaatcgctttctcctcgcgtaataaaacctacgatgaagactattccggcgataagagcgggatcagcctgtataaagcagccgcaaaatttaaatttggcccgacctgggcgcgcgcgggctatattcaaccaaccggccagacgctgctggcgccgcactggagctttatgccgggtacctatcagggggctgaagccggtgcgaactttgactacggcgatgcgggcgcgctgagtttctcctatatgtggacgaacgaatataaagcgccgtggcacattgagatggatgagttctaccagaacgacaagaaaaccaaggtggattaccttcactctctcggcgccaaatatgattttaaaaacgaccttgtgctggaagcggcgtttggtcaggcacagggttacatcgaccagtattttgccaaggccagctataagtttgatgttgcaggcacgccgttaaccaccagctatcagttctacggcacccgcgataaggtcagcaacggcggggttaacgatatctatgacggcaccgcgtggctgcaggcattgacctttggctataaggttgccgacgttctggacctgcgtctggaaggaacctgggttaaagctgatggtcagcagggctacttcctgcagcgtatgacgccaacttacgcatcgtctaacgggcgactggatatctggtgggataaccgttcggacttcaacgccaacggtgaaaaagcggtgttcttcggcgcgatgtatgacatgaagaactggaacatgccgggctgggccttcggcgcctcctacgtttatgcctgggatgcgaagccggggagaatgtcctcgcctgatgcgtactacaacccggataaacgcctggaagagtccgcctatagcctggatgccatgtacaccgttcaggaaggacgcgctaagggcacgctgttcaaactccactttacgcaatacgacaaccactccgatatcccaagctggagcggcggttacggcaacatcttccaggatgagcgcgacgtgaagttcatggttatcgctccgttcaccattttctgatgccactgcggcgggggaaacccgccgcaatttcccgaggttcatgatgaaaaagttaatacttgtcgccattatggcagcaggtctggttgcctgtacccagtcgccagcgcctaaggaagactcaaagttaaaagatgcctacagcgcctgcattaataccgcagagggcaatccggataaagttgaagcctgtcagagcgtactgaacgtgctgaagcaggagaaacagcatcagcagttcgcgacccaggaaagcgtgcgggtgctggattatcagcagtgtatccaggcgcgcaaaaccgggaacgatcaggctgtagaggcgcgctgcgaccagatctggaaagagatccacagcaacaatacgccgcgttaagccagacggcggcaagcaaacgggcggagcgtcaactccgcccgttgctattttagcggggtatttctgccggctggtagccgcggcccaggcgtacgaagagcatcgcggtagcggccaggccgcatagcgcggcgcacatcagccaccagcccggcgagcttttatcgcccgttatctcgaccagcgcggtggaaatggccggcgtcaggccgccgaagatcgcggtggcgaggctaaaggccagtgaaaaacccacggtgcggacgtagaccggcatcacttccgtcagggcggccaccatcgcgccgttatacataccaaagaagaacgagaaccagagcaggaccagcgtcatgcgggtgaaatccggcgcggcggtgagccagtgcatgaccggccaggtagtgagcagcgccagcagggttatgcccatcagcaccggccgacggcctattctgtcagaaattgcgccgccaatcggtaaccagataaagttagagatgccgaccagcatggtcaccagcagactgtcgcgggcgctcagatgcagaacggctctaccgtaggtcggcgtatagacggtaataaaataaaaggtggtggtagtcatcgccaccagcaaggtccccgccgtgatgatgcgccagtttttggcaatcgtgctcaggatctcccgcgtgtcagggcgatgcttgcgctgcagaaaggcttcggtttcctgcaacgaacgccgcagcacaaaaatcagcggaataatcatacagccaataaagaagggaatacgccagccccattcggcaatctcatcgtggccgagcgtttcattcagcgcataaccaatcaacgccgcgaagacgatagccacctgctggctggcggattgccagctggtatagaacccttttttccccggcgtggcgatttccgacagatagaccgacacgccgccgagctcgacgcccgccgagaatccctgcagcaggcgacccactaataccagaacgggggcgagaatgccgatggtttgatagccgggaaccagcgctatcagcagcgtcccgcagcccataatcgccagcgtcaccatcagccctttacgccgtccgatcctgtcaatataggcccccagcactatcgcgccgatggggcgcatcagaaagcccgaaccaaacacggcgaaggtcagcattaacgccgcaaactcgctctccgccggaaagaacgttctggcgatataggtggcgtaaaagccaaacagaaaaaagtcgaattgttcgagaaaattaccgctggtcacgcggagaatggcgccaaaggtaccggcgcgcgatgagggttgcgtcataggggttgctctccattgtctttatcttgtttttatagaggtaagatgagcggactagtcgcctgcgactgccgcctgttttccgcgccgtttctcaatcgcccacttgagtaacgccgcacagcgataaaatccgtgggcgaattttccgtatggcagggtcaaaaacagcgccatgaccacgccgaggtgaatggcaagcagaatgcccatccacgaggtgtctcgtcccgccagcagggcgaggccggtgaagctggtcagcagcagcagcagaataaagccgcgatccatcggtttttgccgcgggtcgccgtgcagcggcgagcggcgcaggttcagccatagcaaacccgccgggcccaccagcaggccgatgccgccgagcgtgcccagcacaaccggtacgctgaagaacgggtagggggcctcccagccggcgatatagtgataacccgtggctaccactgtggcggcgaaacagagcagaaacccgtagaaggtaaagtgatggaaacggcggcgcagcagggtaaacgcgtcatcggcctcgttgcagcccttaccgtgcccgccgtcgagatacttcagcgtgagcgcattatgcgaggcttcagcgatgtcgatggcctgaggctgacccggcgagatctcgcgccagaagcggatcaccccggccatcagtaaccccatggccagtatgaagaccgtgccaaacatccacgccagcaggttatggggaaaaatctggtagaaatcgccggccagcggtggatgaagcagggagcctttgagccccatcgccagcagcagaaagaggatcagcccgccgaccagcgccagtaccgtggttacgccggcccgacgatacaggctgccgaaagccgcgggctgagcatagtgttgataggtctccaggcgcacttccgccatcgccttcgggacattaatggcaaactcgtgcggaggcgcgtactggcaggcatgcaggcaggcgccgcagttatggcacaggttggccaggtagtttatatccgctttgccaaaagccaggcgctgggtcatggccggaaacacggcgcaaaacccttcgcaatagcgacaggcattacagacctgcatcacccgttcaacttccgcttccgactcggtgatgatttgcgcgtcaatgatcagcatttcaagcgatttcatggtgtgtctcctgctgtgccgcgcgggcggcctgctggccggcaatacggccgaacgtcgtaccgatggacatgcccacgccggcggtataccccttgcccagcacgttgccggccatcatttcgccggcgacgaacaggttgcggctcggcttgcccgcaaaatggacggcggcgcgttcattaacgtacagcccaaggtaggtaaaggtgatccccggccgtagggcatagccgtagtagggcggggtatcgatgggccgcgcccagtgggttttcggcggcgtcaggccggatgtcgcgcagttatcaaggcgggtatgatcgaactggcccggcgtacaggcggcattgtagcgggcgatggtttgcgccaggcgttccgcgtccagccccagctggcgagccagctcttcaatggtattggcctgggcgccggggaaaacgggcggcataaagtggccgatcgctttgctgtcgatgatcgagtagccgatttgccccggctggtgggcgaccagcctgccccagatggcatagcgtttgggccagaaatcttccccttcatcataaaagcgcccggcgtcgcggttgacgaccacccccagcgatacgcagtccacgcgcgtgcagatgccgccatcgtagagcggcgcccgggcgtcaatggcgacgcagtgggattgcgaaggatcgccgatgatgtcagccccggcgtcaatcataaacttgagcagcacgccctgattgaaacgagtgccgcgaatgagaaaattatcggctggccattcaccgcgctcgttctgtccccatgcttcacgcagccactcgcggttagattcaaatccgccggcggcgaggacgcaggttttggcgacgatcctctcttcgcccgccagcgcggcgacgaattcgccgttatctaattcgagcgcctgtaccggcgtgttgtagcggatctttacgcccatctgctccgcgctgcggtaataggcatttataagagccttgccgccgcccataaaaaaggcgttggtgcgggccacgtgcagggcgccggagagcggcggctgaaagttaaccccgtgctggcgcatccagtcccggcactgcgatgaggtgcggatcaccaggcgcgccagcgcttcgttggtgttgccctcggtgacgcgcagcaggtcctgccagtactcttcttccggatagctgtcgaccaaaacatcctgcggagcatcgtgcatacagcgaagattccgcgtgtgctgagagttgccgcctcgccattcccgcggcgcggcctccagcagcagtacggacgcgccagcttcccgggcggttaaggcggcgcatagcgcggcattgccgccgccaatgaccagtacatccaccatttatggctccattacgctttgcttgattgttaaaattgtaatggaaatgtatgcgttacggccggctggacgctatggcgtattgctaaaggggggtttagtttgcgtaaaggctggcgccgggccagcgacctgactcaaccagctgacgcatgactttcgccagtattacgcgggccgcaaggcctgccggagtcagttcatcatcggaaaggctgacgagaaaattaggtcgactaagtatcggattgtcgacgccgatcactctcagggactcgctgtcgagatgggaaattgccgcccccggctgcaaagtggcgccgagcccgtcgcggacggcgcgcatcagcagggccaggccgtcgatttcagccaccacatcgacgctcagggcatgctcctggcagatcgcttccagcctgccgcgcagtccatgccccaggcttggcataatcagcgggatagcggccagctggccaggcgagatactcgcttcgggaaggggggacaggacgtcataggtgccaatcagaaacagacgctcttcaaggatgggcctggcgctccagcgcacaagcttctccttctggaacacgatagctaagtcaagctggcgggtgttgatcatgcgttccaggttaccggagaggctctcgaccaaatgcaggcggacgtcggcatagttttcgcgcatcgcgtgaataaaaggcaccccgagaacggaggcggtgctgggggccataccgacgctgacgtggccggaaaggcgcgcctcgcgcgcggcgagaaccgcatcatcggcgtgacgcagcgcgagctgcgcctgggagtagaaggcgaggccggcgctggtcggcatgacgccgcgagacgtccgctgcagcaggcgaatggcgagttcgttctccaggcgcgccatctgttggctaagcgcggagacgccgatatccaggtcaagcgcggcgcggcccatactgccggtttcaataatgcgcacaaaatagcgtagctggcgaagctccatgtcgactctccgtacacgtcaggatgcactgacagtaaacgtattgcagcgcgagagaaagaggcggcagattccgggcaaaaaaaagccaaccttcaggctggcttttggcggtacacgatgcggtgattatttctctgccgcgtcgtgggcatgttcatcttcgcggcagtcgccttctgcgcagtggccgtacaggtacaggctgtggttagtcaggcgaataccgtgccttgcggcaatttcacgctggcgcgcttcaatggaatcatcgctaaattcgatcactttgccgcagtcgaggcaaatcaggtgatcgtgatgatgctgctgcgtcagttcaaaaacggatttaccgccttcgaaattatgacgggtgacgatgccggcgtcgtcgaactggttcagtacgcggtagacggtggccaggccaatctcttcacccatatcaatcaggcgtttgtataagtcttccgcactgacatgatggttatccggtccttgcagcacttccaggatttttaatctcggaagcgtcactttcaggccagctttctttaatgcggtattgttgtcagtcatgcggaatctgtcctgttgctaaacgatctacttccttcagcggaagtaatacagagaatcacccgatgtaatgcgtctcattatagaactgccatggtgaaatgaaaactgcaagcatcgggccttgtatgctgtcaaaaacgaggcactcgctacaaagtgcttcacgcgaccccgttaaatcagaggacattgtacagatatgtgattaaaagttaaaaacttgtagctataactttgattgcttttatctattaattcggcgaaacctgatgattacgccgttcagactcaggcattcttgatttcttcgaggtgcagctcttcagaaatctgttttacccatttttccacgcgttcgttagtcagctcaggctgacggtcttcgtcaatggccaggccaacaaagtgatcgtcatcggccaggcctttagaggcttcaaaatggtagccggcggtcggccaatggccaacgatagttgcgccgcgcggttcgatgatatcgcgaatggtccccagcgcatcacagaagtattcagcatagtcttcctgatcgccacagccaaacagagccaccagtttgccattgaaatcgatctcttccagcgtcgggaagaaatcgtcccagtcgcactgggcttcgccgtagtaccaggtgggaatgccgagcagcaggatatcgtgagcttccagatcctctttgctgcttttggcaatgtcgtgaacatcagcaacgtctttaccaagctgcttttggatcatttttgcaatattttcggtgttgccggtgtcgctgccaaaaaagatgccgatgattgccatgagtaaaataacctcttgaaacttaatgatgtggtagtggcgtaatgcccgcagataggggcaatgatagcagaactgagaagggcgcggaaacagcaatcacgcccaactgcacactctgctacacgaaagcttattttttgagggttttaggctttatcctggccgcgcagggctgccagctggttcatcagcatctcttcgatgagatcgctgcggttcatgttacgggcttcggccagctcattaagcgcatcgacagcatcggcattgagctttagctccacgcgcttcagaccgcgactcttatcgcgtttaagctgattgcgtttgttgatgcgcagctgttcatcgcgcgaaagcggattcgttttcggtctacccggccgacgctcagttgcgaacaaatctaatgtcgtacggtccgtttgttcttttgccatgattcagagtgacttcgggggaaacaagctatcgggcatagccgacgcagacagcgcgccataatacatcaggcgacgggctgcgccaacggccgcgggcattaagccgcgcggtcgagtatattttaggcagttacgcggcgatagaggtcaaataacgacggatcgcgcggataacggcctccggtttttctgcatgcacccagtgcccggcgccggcgataacgtgcgcgcgcgcctggggaaactgagctaataaagtctcgcggtaggcatcggtgacgtagggggagttgccgcccggaataaacagcgccggatgcggccagggcggaacggtttgccagccgacgatattatcgtactgctcccacagcaccggtacgttaaaccgccactggccgtccacgaaagattttaacagaaactgaatcacgccctcttcgttaaggcgctggcgcatgaccgtcgccgcctgctgacgcgtagcggcccccgcgtcggtgacggcattgatggcggcgaagatttcatcatggcggcggacgtgataatccaccggggcgatatcaatggcgaccaggcccgcgatacgctccggggccagcgcgctcagcgccatcaccgctttaccgcccattgagtgaccaataaaggtggctttctcaatctgtgattcattgagaatatcaagcagatcctgggccatcgcgggataggtcatgtcaggcgagcgcggcgaaaggccgtggtttcgcatgtcgacctggataatatcgcgatcgagaaccagatcgcgggcgaggatcccaagattatccaggctgccaaaaaggccgtggaccaggacgatagggggattattgtgcggattctgtgcagattgcgctcggctatttaatttcatggcaaagttctttttttcgctccgtcgggttagggtattatgttggacattctgccatccggctgcaagacccggaagatatccgagttttaccgccatcctggtttgacgctatccgcggttgggatttgtccctataatcccgacaacttgtattcagaaaaagatatcgcactggattaagatgaaaacaattgaagttgatgatgaactctatagctatattgccagccacaccaagcatattggcgagagcgcatccgacattttacggcgcatgttgaagttttccgccgtttcccagcctgtcgcaccggtagcgaaagccgctacggcccctgcgccaacgcctgtcgttgaagtgaaacccgccaatcctctgaaagataaagttcgcgctatgcgtgagctgctgttatctgatgagtacgccgaacaaaagcgcgcggtaaaccgtttcatgctggttctgacgaccctctacgccatagacagcaaagcgtttgccgaggcgaccgagtccctgcacgggcgcactcgcgtttatttcgctgaggatgaacgcacgctgcagaaaaacggtaatcagacgaaacctaagcaggtaccggggacgccgtggtgggtcattacaaataccaataccggtcgcaaatgcagcatgatcgaacatatcatgcagtcaatgcagttccctgcggaattgatcgaaaaggtttgcggtacgatctagttagttaactttgcaccagaaggatcaggcaatggcaatcgataagcgcgcgggtcaacctgcgcaacagagtgatttgattaacgtcgcccaactgactgcccagtactatgtgctgaagccggaagttggcaacgcggaacatgcagtgaagtttggcacctccggtcaccgcggcagcgcggcgcgccacaacttcaacgagcagcatattctggcgattgctcaggcaattgctgaagatcgcgcgaagaacgggatcaccggcccatgctatgttggtaaggacactcacgcactctccgaaccggctttcatttccgtactggaagtgctggcggcgaacggcgttgacgtcatcgttcaggaaaacaacggcttcaccccgacgccggcgatttccaatgcgattctggtgcacaacaagaagggcggcccgctggctgacggtattgttatcacgccgtcccacaacccgccggaagacggtggtatcaagtacaacccgcctaacggcggcccggcggataccaacgtgactaaggtggtagagaatcgcgccaacgaactgctggctgccggtctgcagggggtgaagcgtatttctcttgatgcggcgctggcctccggccacgtcacagagcaggatctggtgcagccgtttattgaagggctggcggatatcgtcgatatggcggcgatccagaaagccggactgacgctgggcgtcgatccgctgggcggttccggtatcgaatactggaagcgtatcgctgagcattacaatctcaacctgaccatcgttaacgaccacgtcgatcagaccttccgctttatgcacctcgataaagacggcgcaatccgcatggactgctcctccgagtgcgcgatggcgggcctgctggcgctgcgcgacaagtttgacctggccttcgccaatgacccggattacgatcgtcacggtatcgtcacgccggccgggttaatgaacccgaaccactacctggcggtggcgattaactacctgttccagcatcgcccgcagtggggcaaagatgtggctgtcggtaaaaccctggtctcctcggcgatgattgaccgcgtagtcaacgatctggggcgcaaactggtggaagtgccggttggctttaagtggttcgttgacggcctgttcgacggcagcttcggcttcggcggcgaagagagcgcgggggcgtcgttcctgcgctttgacggcacgccgtggtctaccgacaaagacggcatcatcatgtgcctgctggcggcggaaatcaccgcagtcactggcaaaaacccgcagcagcactacgacgagctggcagagcgcttcggcgcgccaagctacaaccgtctgcaggcttccgcgacgtctgcccagaaagcggcgctgtctaagctctctccggaaatggtgagcgccagcaccctggcaggcgatccgattaccgcgcgtctgaccgcggcgccgggcaacggggcggcgattggcggtctgaaggtgatgaccgacaacggctggttcgccgcgcgtccgtcaggtaccgaagatgcctataaaatctactgcgaaagcttcctcggcgctgaacatcgtcagcagattgagaaagaagcggtagagattgtcagcgaagtgttgaaaaacgcctaattgaccgcacgataaacaggcccttttcagggcctgttttttttcgcagggatagcgatgaatctggaacgaaaaaacgttttttggttttggggtgggatggatctcttttatctcttgcagtttattggctggaacatctaccaccggcgagtaccgctttacgacgatatcctctcatttttaccgctgctgcaaacctggggctccgcggccgcctggctgtttacccttcattttattctgactatcagcattcccgcgtcgatggttctcttctggcgccagagccgctatgcgccgtggctggcctatgcgcagacgccgctgcgtctggcctttatgctcccgtcgctttcgctggtggcctggctggcgcaggcggtggcgttgaaaagcgcggccttctttattgctctgctgctggtctcagaggcggcaaaagtcgtgacattatggcgatgctgcaaggtttaacgttatgtgttatccagacggcacaggcctggcgggtattacgctgactgaatcgggcataaacgggtattattgctttgaccgggtttgcccgttttagcgaatatacggctaaagcaaacgaacaatcacggctaattctgcgattttaatcacaaatttattccatccaaaatgaaagttgcctgatatatatgatcaacttcaaactaaaaaaagctaaaaacttgttttgattttgtatgatttatgtcacttactgatatggacgattttgttatatttatgtcattaaatcctgaatgctttcttgagaacgtctatgttacaagttaaacgtcattcattaattgtggaatatgtcgtagaaaaaggatgcgccagagttaatgagctctcacagatattcggtgtatctccagaaaccattcgccgggatttaaccgcgctggcgagaaataaaaaaatagttcgtagctttggcggtgcaatgatttctgaaaataatgcatcatttttagctgccgatacgccgacaaatcacgggaactttgtcgataaagccgaggcctttattaagcgcaccaaagagcagccggaacgtaagatgcgtattgctaaaggcgcgctgcagtttattcatgagcatgagtgcattatcatggataatagcagctcctgctggtttttagcgcgccagctgcctgacatcgagctgaccgtgattaccaattctttgaatattattcaaaccttagcctgtcgtaagaaaataagaatagtcagcgttgggggtgaatattctgagcgccacggtgattttcacggtccggtcgccgagttcattatcaacaactttaaggtcaataagctgtttttttcttgccagggtctcgacgccgggctggaaataaaagacagcaatgaagtcaacgtccggctgaagcaggagatgctgaaagttgccgatcaaaaaatcctgatggtcgatagcagtaagtttgaacgttattcactctataaaatatgcgatctggcggatattgatgtgttgatcactaacgaattaccagctgatacctatcgccagcaccaggtacatattgtcgagactaaatagccgctctgccagatattctaccggcattattattgaatagcccttgtgcccgatggaggggtattgcgccagcaataccatccctcttcattatttatccgaaaaagaggtttacgatggaacaattacctgaagatatgaaagcggttgtctgccatggtccccaggattatcgctttgagaaaattccccgcccggtcgccaaagaaaaggaagtggtcattaaggttgacgggtgtggaatctgcgccggcgactgcaaggcccaggacggcgcgccgatgttctggggcgataatccgtgggtgaaaacgccggtggtgcccggccatgagttttacggtcgggttgccgaattaggcccgggctccgctgaaaaatatcaattaaaaattggcgatcgcatcctggctgaacagattgtcccctgccatgagtgccgtttctgtaaaaccggcaaatactggatgtgcgaaacccatgatatttacggtttccagaaggaggtcgccgatggcggtatggctgaatatatgcgtttttccgaacgggcaattattcacaaaattcctgaatcattaagtgaagaagatgccgcgctgatcgaacctatggcctgcgcaatccacacggtacgccgcggtgatatcgaactggatgatgtggttgttatcgccggcgccgggccgctggggctgtgtatggtgcaggtcgctcatctgaaaacgccgaagaaactggttgtcatcgacacgatggacgaccgcctggcgctggcgaaagcgtttggcgccgacgtggtcatcaatgcggcgcaagaggacgccatcgctatcgtaaaatccatgaccgatggctacggctgcgatgtgtatatcgaagcgacgggcgcccctatcggcgtgacccagggtctggagatgattcgtaagctgggacgcttcgttgagttcagcgtgtttggtaaagaaacgaccgccgactggtcgattattggcgaccgtaaagagctggatatccgcggcgcgcatctggggccttacagctatgaaatcgccatcgatctctttgcgcgcggtctgctgaccgccaaaggcgtggtgacgcatttctattctattgatgagtggaaagccgcttttgagatggctaaatcgctcgattcgattaaggtcgtcattaagccataaattttttaactagttaagttcgccatttttaattattacgcaaatgaccgctgatggctgttcattaaatactggatttcaatcatggggataactgagaacaatatcggtggcttctggctatctgccagcggcgtatttattgctcagtatatcaggcagcatccgcaccatgaaaacgctgataaataaattttatttctcagcgcattactcaataaggagatagtgaatgcctgtaaaatttaagactaaagcaatactctcaggacttcttgcgatgagcatggttgcctgcgttaatgccaaacctttgactatcggtatgtcgttccaggaattgaataacgaatatttcgtcaccatgaaagagtcgcttgagcagtcggcaaaagatattaacgccaccgtctataccgcggatgcggcgcatgatgtctccaagcagattagcgacgttgaggatatgctgcaaaagaaaatagatattttgctgattaacccggctgatagcgtcggtgcggaaaccgccgtgctggccgctaaaaaagccggcgtggtggtggtggcgatagatgctcaggctaatggcccgatagattcttttgtcggctcaaaaaactatgatgcgggctttattgccggggaacacttagccaaagcgctgggtgataaaggcaacgtagcgattctcgacgggattccggtggtacctattctggagcgcgtgcgcggctttgaagatgcgatgaaaaagcatcctaatattaaagtgattaccaaactgaatggtaaacaagagcgcgatacctccatgagcgtgacggaaaatatgctgcagtccaacccgacgctcaacggtatttttagcgtgaatgatgttggctcactcggcgctctggcggcgattcaggcatcagggcgcgatgtgaagctggtgagcgttgatggttctccggaagcggtcgctgaaattgctaaaggtaatacgccgtttattgccaccgccgctcagttcccgcgcgatcagctgcgtattggtttaggtattgccctggccaaacattggggggcgaatattcctaaagagatccctgttgatgtgaagcttatcgataaaaccaacgccaaagatttccactggtaatcgcattattacgccatagcggctctcgcttattcaggtgagccgtgccggattcttcttaaagtatggctcgctattttatcgagccattatggagcgatgtttatgcccagcttactggaagtcaaaaacgtcagtaaaagcttccccggggtcaaggcgctggataatgtcaatatcacccttggccgaggggaggtgcatgctttattaggtgaaaacggcgcgggtaaatcgacgttaatgaaaatcctttgcgggatatatcaacctgacgccggtaatatttttattgacggtaagcagcagcattttcataactatcgtgacgcgattgcctgcggcgtagggattatctttcaggagttttctcttattccctatctgaacgcttatgagaatattttccttaatcgcgaaaaggtaaatcgttttggcctgctagatcgtaaagcgatgcgccgcgaggcgttacgcatttttaaagatcttggcgtgaccctcgatcccgatgagcaaatttgccatctcagcgtcgccgaacagcagttcgtggaaattgccaaagcgctgtcgctggatgcgcgaattctcattctggatgaacccaccgcgaccttaaccccgagcgaggcggagcatcttttccgcgtgatgcgcgatttaaaggccaaaggcgtcgggatgttctttatctcacaccaccttgaggagatatatgagatctgcgacagcctgagcattctccgcgacggcaaatatatcgggtcggcaaaggtcgacaatatcgatatcgccgagatgatccagatgatggtcggccgtgaggtggagaatatctatcccgagcggcggacgctggcgcatgatgagatactgctggaggccgaaattcagcttaccgagagtagccagctcaatcgactgacgctgcgcaaaggggagatcctgggcctcgccgggctggtggggtcggggcgttccgaagcgatcctggccctgaccggcgcggataaatgcttcaaaaagcgcgtccgcctggccggaaaagaggtgacgataaaatccaccgaccgggctctgcgtctgggcattggtctgttgccggaaagccgcaaaacgcagggactggtgctgcctttttcggtcaaagataatatctggcttaacaaacacgcctgccagttctcgcttatccgcgataacgaagagcgcctgaccgccgagcgtttaattaatcacgttggcgtgaaaacgccggatgccgggaccgcggtgggcacgttgagcgacggtaaccagcagaaagtcgttatttcccgttggttaaatcatgatgtcaatattcttatttttgacgaaccgactcgcggtattgatgtcggagcgaaatcagaaatctatcagattatgcgcgacctcaccgcccagggtatttcaataattatgatttcatctgagctaccagaggtgattggcgttagcgaccgggtaatggtttttcgcgacggtaatatcgttgccgaactcgagaacgaccaaatcaattccactgtgattatgctgcacgctgccggtaatattatttagggagtattaaatgagtaatgaaaacgtgtcattagcgcccgccgcatctcctgataaaaataaaaagatgctccatggtttattaaaaatgcccgcgttcctgccgtttgttggtctggtactcctgttctcctgtatggctatttttaatgactactttttaacggtcgataacttatcgaccgtcgctcgtcaggtctcgattaatgccatcattgccatcgggatgacctttgccattctgaccggcggaatcgacctctccgtcggcgcggtcatggccctggccggtaccctgatggcgggattaatgaagtactatggtttagatccgtggttagccattcttatcggtctgtgctccggcgtcgcctttggcgcgctgaacggctttttaaccgcctacggtaaaatgccgccgattatcgtgaccctcggggcaatgattattgcgaaggggctggcgctgatctataccggcggctaccccatctccggcttaccggattcattcgctttttggggccgtgaatatctgttcggtattcaggtgcctattattctgatggtggttttatatctcatcttttatatcgtcctgaatcatatgccgtttggtcgctatgtttattccctcggcggtaatgaagaagcggcgcgcctgagcggcctgcgggtgaaatattataaattgctggtttacgtgatcagcggttttaccgccagttttgccggccttattttcacctcgcgggtgatgagcggccagccgaatgccggcgtcggatttgaactggatgccattgccgccgtggtgctcggcggggcatcgattgccggcggccgcggaatgattatcggcaccctgattggcgccatgatgctcggcgtactgaataatggtttaaaccttctggggatctctccttacgttcagtacgtggtgaaagggcttattatttggggcgccacctttattagctcagccagacgttaacttattttaaatatgaggcgaagggatatgaattttatcggggttgatatcggtggtacggtcaccaaagccggtatatataatgagttagggcaagagattcacgtggcgtcgcaatatgcgcaggtattatccgaacagccgggctttaccgagcggaacatgcatgagctatgggacactgtttgcagcgtgataaaaaaagcgctgtatgaaagccaggtgccgccgctaagcatcggcgggatcggtttctcctcgcacggcaaagggctctacgcgattgataaaaaaggcgagccggtgcgcaacgggattatctcatccgatacccgggcgctggcgtttgtcaaaaaatggtatcgcgaaggtatagacaagctggcatacccaaaaggattgcagcagctgtggaccggacatccggtgtcgctactggcgtggctgaaagcgcatgaaccggccaattacgacaggatcgacgccgttttaatggtgcacgactacgtacgtttccgcctaaccggcgaggcgacggcggagatcactaatatttccggcagcaatttttataaccagtttacctcccgctatgaccgcgacatgatggcgctgtttggcattgaggaagtggcggataaaaccgcgccggtggtgaactcgacggactgcgtgggccacattaccctgcaggcctcgctggattgcggtttgtgcccggggacgccggttttcggcggctttttcgacgtggtggcctccgccgtctcctcggggattgaccgggcggataccctgagcgcggtggccggcacctggagtatcgccacctcggtgacggatagcattattgccagcgactttccctacatctgggggaaatactgcattccgggtaaatacttcgttcacgagggcagccccacttcggcgagcaatctctcctggtttgtgaagcagtttttccctgacgatgaccgctgctacgaccatttcgaaagctggattgcgcaagataccgacagcaacctcatttttttaccctatttgttcggttccaatctggcgatggatctgcccggcgcgctggtgggcctcgcggggcatcatacgaaaaaggatattattgcggccatctatcgcggcatcgttttttctcacctggtgcatcaggaccgcattattgaactcaatcgggatattcaaaaaattcgctttaccggcgggccgagccagtcgagaggctggacgcagatgtacgccgatgcggccaatcttccgctggaagtggtggatatcgaacaggccggctgtcgagccgccgcgctgtgcgccgcggccggtagcggcgcctacgctaacttcagcgaagcgattgccgccacgcagcccgaggtggtctgctatcaacccgacagcaatcggcatcagcagctgcgtgaaggctacgcccgttacttagcggtcgcgcaaagcctctccagggcgacgggagcggcgcaatgaaacccagacttggcatctacgaaaaagcgctccccgcggcgctggactggccgaaacgctttgaaatggcggcgggcctggcgtttgattttattgaaatctccgttgacgaaagccccgagcgccaggccaggctgcgctggaaccgggggcagcggctggcgttcgtggccgacaaaattaacagcggcattgatgtgccgagcatgtgcctctccgcgcaccgcagccatccctttggtagcgtcaatcgcgatacccggctcaaggcgcgggaactgatgcttgatgcgctggattttgccagccacgtcggcattcgcaacatccagctggcaggctatgacgtctattacgaatcctcttcggcgcagacccgggaatactttatcgagggcatcaactgggcggtggccgaagcggcgaaagcgcaggtgatgctgtcaatggagattatggataccgcctttatgagcaatatctcccgctggctggatctcgaacggaaggtttgcagcccgtggttttgcgtctacccggacgttggcaacttaagcgcctggcaaaacgacgttcctgaagagttgagaaaaggcattcataaaatcaccgccattcatttgaaggatacccagccggtttcccacgcttcgctggggcagtttcgcgatgtgccattcgggaccggctgcgtcgattttatcgagatatttcgtacgctctcggcgcttaactatcgcggcgcctggctgattgagatgtgggccaaaaatgacgggctggacagcgagagaatcgccgacgctaaagcgtggctaacggataaataccagcaggcgtttcgcccgcctcagtatgaaggcattgtgaattcaggagtgaagtatgttggataacctcaagcaggcggttcttgacgccaatctggcgctgccgaaatttcatcttgtgacctttacctggggcaacgtcagcggcatcgatcgcgacgccggactggtggtgatcaaaccctccggcgtggaatacgccgtgatgacggccgaggatatggtggtggtggagctggcgaccggcagggtggtggaggggcgctataagccctcgtcggatacgcctacccatctggagctgtataaggcgtttagcggcgtgggcggaattgtgcatacccattcgcgccacgcgacgatttgggcgcagtcgggcaggccgctgctggcgatgggcaccacccacgccgactatttttatgggccgatcccctgtacccgcccgctcagcgatgatgaaatccgcggtgattatgaaaccaataccggtcacgtgattattgaaacgctgggcgcgcagcataccgatccgctcagcgtgcccgccgcgctggtccacggccacggcccgtttgcatggggaaaagatccggcgaacgcggtgcataatgcggtggtgctggaggagattgcctatatgaatatgtggacccgtcagctgagcattgacgaacagccggtctctgcgacgctactggataaacactatttgcgtaaacacggggcaggggcctactacggacaataatcgcctgccttccccggattgcggcgtaaacgccttatccgggctaccggcccgcagtcgacggtgaacccgtagcccggccagcgtagcgccaccgggatgaaacagcgttgatttatgaggcctggcacatttcccggaggcggcgcttgacgcgcctgtccgggctaccgcctggcagacgacggcggacccgtagcccggctaagcgaagcgcgagccggggacaacggctagggcataaaccgatagccgatccccgtttcggtcagcaaatgctgcggacgcgccggatcggcctccagcttttgccgcaggtgccccatataaatgcgcagatagtggctgtgctccaccgcattcggcccccagacctgattgagcagctgtcgctgggtcagcaccttgccgggattattgagcagtaccgccagcaggcgaaattcaatcggcgtcaggtggatctcctgctcgccgcgtacgatgcggcgggcggggatatcaacatcaatatcggcaaaacgcacctgcggttcgtcggcctgggcgccggcatggcggcgcatcgccaccctcagccgcgcctgcagctcgccaataccaaagggtttactgagatagtcatcggcaccagcgtcaagcgcggcgattttgtcctgctcctcggtgcgcgccgatagcacgataatcggcatctggctccactggcgaacctcgcgaataaacgcgttgccgtcaccatcgggtagtccaagatcgagaatggttaaatccggcttgcgggtcgcggcttcgatcagcccgcgctgcagggtctccgcttcaaatacgcgcatgccgtcggcttccagcgcggtgcgcagaaagcggcggatagcattttcgtcttcaacgatcagaacgttaatcacatttcctcggctaactcttccagttcagggggcgtttccctcggcagtgtaacacggaagcaggcgccgccctgcgggcgcgtcgcggcgctaatggtcccgccgtgcacctcaacgatcgcctggcaaatggccagccccagcccgacgccggggatcgccgactctttattgccgcgagcgaatttatcaaagatagcctgttcttgcccggtggggatacccggtccgttatcccatacctcaagcactaaagtgtgcggatcgacgtccgcggtaatgccgatttgcgcctgtgctcccgcgtatttcaccgcattttccagaagattaatcagtacccgctcaaaaagcggaccgtcgacgtgaaccagcagtagcgggtccggcagcgcaagctgaatatgccgcccgccgagccccggctccagcatacgcagcgcgctgccgacgacctcttccagggttagccactctttatgcaaattaaagccgccggactggatccgcgccatatccagcagattattcaccaggcgggtggtattgagcacgtgctggcgtatctcgttggcctgcggggcgtgcttcgatccttcgctggcgagatcgagcgtcaggatctccgcctggccaaatagcaccgtaagcggagtccgtagatcgtgggacagcgccgccagcagcgagttgcgcaggctttcccgttcgctgttcagccgggcctgctcttcgctggcggtgagcgccagccgttccagagcgctggcgaccagcagggtgaaggtttccagcaggcgctgctgttcggggatcatcagctggcgcaggttggccggctccacgaccagcagtccccaggtgcgggcggcgcttttcagcggcaggatctggtagggcactccgggaagcgtatcggtgcccgcaccggcgggttgtcctttatcaaagctccagcgggcaatcgcgtcatcccaggtgattgccgccgcgggctttgtcagcggcgtgagtcttaatgtttcatcgggcagcagcagctggctgcgcgcctgaaacgttgaggcgataaaccgctcgctggtggcggcgatatcttcacgactgcggcccaccgccagcgcttttgacatttcgtacagatgccgggtgcgctgttcacgatagcgcgccacccgcgcctggtagcgtacgccggcggtgaggttgccgataagcagcccgacggtcaacatcacgccaaaggtcagcagatactgcacgtcagaaaccgccagcgtgccgcgcggcgcgacaaaaaacaggtcgaagctgaccacgttaatcaccgtcgccagtaccgacggccagcggccgtacagaagggcgataatcaccacgccgagcaggtacagcatcaccaggttggcggcctcaaaggccatcagccactgcatggcgacgacggtaataaccgcgcacagggcgatggcgacgacgcacccctggagctgtaaacgccatttttccatcgccgtccggctatcgctggcgcgcgccggcagggaggcggccttttcatccagcgcgatcaccaccaggtcgagatccggcgcgtgacgggccaggcgatcggcgaagccgctgcgatcccaccagcgccttttctgctggcggccaatcactatcttgccgagattatgttcgcgggcgtagtggaggacggccttctcttccgaaggatcggcgagggtggcggtttccgcgcccagctcctgcgccagcctgagcgcggcgagaatcgcccgccgtttcgcctccggcaggcggtgcagagagggggtttcaacatacaccgcatgccagacgctccccagccgggccgccagccgggcggcggcgcggaccagcttttcgctgccggtgttatggccgatgcacagcaaaatggcgtcgcgggtatgccagactttttcctggccctgacggtcgcgccaggcgcgcatctgctcatcgacccgatcggcggtacggcgcagcgccagctcgcgcagggcgatgaggttgcccttgcgaaagaagttctcgatggcccgctcggcctggccgccgatatagacttttccctcattgagccgctgacgcagatcgtcggggggcaggtccaccagtaccacatcgtcggcggcgtcgaaaaacggatccgggacggtttcgcgaacctgcacgccggtgatgccgctgacgacatcgttcaggctctcgaggtgctggacgttaacggtggtaaatacgtcaatgccggcttccagcagctcttcgacgtcctgccagcgtttaggatgacgcgagccgggcgcgttgctgtgcgccagctcatcgaccagaatcagcgccgggcgacgggccagcgcgccgtcaaggtcaaactcctttacgtagcgcccgcggagggaaaggcggcgctggggcagggtactgagcccctcaagcattgccgccgtctctttgcgtccgtgggtttccgccacgccaatcagaatatccagcccctgggcgcgcagccgctgcgcttccgccagcatcgcccaggttttaccgaccccggcgcaggcgccaaaaaatatctttagcctaccgcgatgcggggcggcggcgtgttgcagcaggcggtcagggtccggacgcagcggctcgtcactcatttttacttatccttcagggcatccagcgacatattcagctgcagtatatttaccacaggttggccgagaaaactgagcaacggtttttgcgttgcctcgttcacaagctgcgtgacctgctccacgctaagctggcgcgctttggcgacgcgcggcgcctgccacagagcggcggcaggcgtcagactgtaatccagtccgctcgccgaggcggtcaccagctccaccggagccgttgcgctggcgtccggattggcggcgcgcagggcctgcacccgttcgctgatggctttgtccagcgccggattgctggcggcgaggttgctgccgccggacgccagcgggttatccggcatctccgccgtcgcggaagggcggccctggaaatagcccggcgcggtaaagttctgcccgataaggcgggaaccgcgcacttcgccgtcaatccgcaccagcgagccgttggcctgctgcgggaaccaccactgtcccagcgcggtggttaacagcggatagacgccgccggtgagcagcgttaacagaataaacagcacaacagcaggacgaatgaatgacatggttttttcctcacagcagcccggtcagggtcaataacaggtcgatcgctttgataccgataaagggcaccagcagtccgcccaggccgtagacccacaggttgcggcgcagcatcgccgaggccgtcagcggcttatagctcacgcccttcagcgctagcgggatcaggaagatgataatcagcgcattaaaaatcaccgcgctcaggatcgccgaagaaggcgagtgcagatgcatcacgttaagcatcgccagcggcggatagacggcggcaaaggcggccggaatgatggcaaagtacttcgccacgtcgttggcgatactgaaagtggttaacgaaccgcgggtcatcagcatctgtttaccgatatgtacgacctcgatcagtttggtggggttagagtcgagatccaccatattgcccgcctctttcgccgcctgggtaccggagttcatcgcgaccgccacgtcggcctgcgccagcgccggggcgtcgttggtgccgtcgccggtcatcgccaccagccgtccttccgcttgatactggcggatcaacgccagcttggcctccggcgtcgcttcggcgagaaagtcgtccacgcccgcttccgcggcgatagcggcggcggtcaggcggttatcgccggtgatcatcaccgtcttaatccccattttacgcagctgggcaaaacgctctttgatgccgcctttgacgatatctttcagcgagataatccccaacacgcgttcgccttcggcgaccacaagcggcgtggcgccaagacgcgccacgtcttcaacctgtttatcgacgtcggccgggaagtggccgccgttggcctcaacgtggcggcgaatggcatccacggaacctttgcggatcatccgctggtcgatgttgatgccgctcatccgggtctgggcggtaaacggcacgaaggtggcatgcagcgattgcagatcgcgctcgcgcagattaaagcgctgttttgccagcaccacgatgctgcggccttccggcgtttcgtcggccagcgacgacagctgggcggcatcggcaagggttttctcttccacgccctgcgcaggcaggaatgccgaagcctggcggttgccaagggtaatggtgccggttttgtccagcagcaggacgtcgacgtcgcccgccgcttcaaccgcgcggccgctggtggcgatcacgttcgcgccgagcatgcggctcatcccggcgacgccgatggccgacagcaggccgccgatagtggtggggatcaggcacaccagcagcgccaccagcaccgtgacgctgaccgcgttaccgctccaggcggagaagggccagatggtggcggtggccagcaggaataccagggtcagggcgataagcaggatagtcagcgcgatttcgttcggcgtcttgcggcgctgggcgccttcaaccatggcgatcatccggtcaaggaaggtttcgccggggttgacgctgcagcggatcaccagccagtcggagagaatacgcgtcccgccggtcaccgaggcgaagtcgccgccggactcgcggataaccggcgcggattcacccgtaatggcgctctcatccaccgacgcgccgccttcgataacttcgccatcgcagggaataatatcccccgcctcgaccagcaccacgtcgcctttacgcagctcttcggcggggacgtggtcaatttgcgcatcgtgctgcggcgcgcgcagcttacgggcaaaggcggtctttttgacccctttgaggctgttagcctgcgctttactgcggccttccgccatcgcttcggcgaagttggcgaacaggacagtgaaccacagccagagactaacggcggcggtaaatccggcgctgccggcgatctgcccgcttgccatggcaagagccagcagggtggtgagcagactgccaatccagacgataaacatcaccgggttacgccactgtacggcagggctcagttttttcacggcgtccagcagggcctgacgcaccagcgtcggctccagcagggctaatgatttgcgactcataacaggttgctccgcaatcgcttaaagtaaggaaaagtgttccgccagcgggccgagcgccagcgcgggaataaaggtcagggcgccaaccaacagcacggtgccgatcagcaggccgataaacagcgcgtcatgggtggcgagcgtgccgctgccggcgggctgaattttcttcgttaccagcgaaccggcaatcgccatcaccgggataatgactgcgaagcggccaaccagcatgcagaacgccagcagcaggttccagaacggcgtcgccgcgctgaggccgccaaaggcgctgccgttgttgttggccgccgaggtgacggcgtacagcacttcgctgaagccgtgcggcccggggttgaacatgcccgcgcgaccggcttcggtcatcatcgccagcgccgtgccgaggagcaccagcgtcggggtcacgaggatcgccagcgcaatcattttcatttcgcggacgtcaattttcttcccgaggtactccggggtgcggccaatcatcagcccggcgataaataccgccagcatcacgaacagcagcatgccgtacagacccgagccgacgccgccgaagaccacttcgcctatctgcatcagccacatgggaaccattccgcccagcgcggtaaaggagtcgtgcatggcgttgaccgccccgcaggacgcggcggtggtgaccacggcaaacaggctgctggcgagaataccgaaccggctctctttgccttccatattgatactgctgtcggcgccaaggctcagcagatgcgggttaccgcgggtttccgcccacatcactaccgccacgcagacgatgaagatgagcgtcatcgcccatagaatggcccgtccctgacggcgatcgcccaccacctcgccgaaagcgaagcacagcgccgccgggatgagaaagatcgccagcatctgcaccaggttggtcagcgcggtcgggttttcaaacggatgcgctgagttggcgttaaagaagccgccgccgttagtacccagcattttgatcgcttcctgtgaagccaccggccccatcggcagcatctggcgtaccccttcaagcgaggtaaagccctgattcggggaaaaactctgcggcacgccctgctgaataaagaacagcgcgatgagcagcgaaatgggcagcagcagccagagggtgatgcgggtcagatcgacccaggcgttgccaagggtgctgactttctgccgggcataggcgcgggtaagggcaaagatcaccgcgatgccggtggcggcggagaggaagttttgcaccgccagcccggccatctggctaaggctactcatggtggtttcaccggcataggcctgccagttggtgttgctgacaaagctcaccgccgtattcagcgccaggtcccacgacaggccgggcaggtgctgcggattgagcggcagcgagccctggaacatcagcagcgtgaacaggaccagcagacccagcgcattaaacagcagaatagcgaataaatattgataccagttcatctcctgagaacgaatgcccgccgcccgccataaaccgcgttcgatgccggccaggcccggtagcggggaatcattgatcatcgtcgccagcgccgtgcccagcggacgagccaggatcatcagcagcagaataaagctcgcgatgagtaaaaatccttgagcggccatcagaatgcctccgcgtgtatcagggcataaaccagataaaccagcaacaggaacaccagcgctacgccagcgattacgcctgcactcacaatccacctccgggtgtctttttgatttacgaggagaataggcagtcgggcgcaaagatttcgcaaaaatctgcggcgggggtgtaaaaaaaatataaaaatcgccaagaccacaatttaactaatggttagtattaatttaacttttttgtaactaagttaccgggtgaatgtaaataaaggctaaatacgtgctttttagtggtcggatgagtagtaaaattacagccaaagcggtactattttaagcagagaaacagattaactttaccggctttgcttgccggcctgacaaaggggagagaaattatggcgttgtacaaaacttatcctgctcatatcatctttgcgcgtcgcgctttcgccgtggctgctggcgtgctggcgctgccggtaatgctgttctggaaagatcgcgcccgtttttatagctggctgcaccgcgtgtgggcgaaaaccagcgaacagccggtatggctggcgcaggccgaaaaagtctccgcagatttttattaataacggtttatgcctcagcgggcgcgcgctgcggaaacgggctaatggcttgatatcctggcttatttaccctgtcttacccggcacagcgtgccaacagattgccttatcatcatgccgccggtttacccggcggtttttttttgccatgagtggcttacacttattcactccccgaaggttaagccggcgggagggttaaatataagtcgaacttatcaattttcatgatgaaaggaatgctatggccacccatctggtctggtttcgcgcggatttgcgcatccacgataacctggcgctcgccgccgcctgccgcgatccccatgccgaggtgctgggattatttatcgccacgccagggcaatggcgccagcacggtatggcgccgcgccaggcggcgtttatgatcagccaccttcacagcctgcaagcggcgctggccgaaaaggggatcccgctgcagattgaacatgccgcagatttcaccgccagcgtggcgctgctcgccagaatttgccggcagcggcaggtgacccatctgttttacaactaccagtacgaaatcaatgaacgccagcgcgatgcggcggtggagaaaaccttagcggaggtgacctgtcagggctttgatgacagcgttctgctgccgccgggcagcgtgctgaccggcagtcgtgaaatgtataaggtctttacgccgtttaaaaatgcctttattcgccgtttgcaggaagcgctgccggagtgcgtcgccgcgccgaaagtccgcgcgggcgggcccatcgctgcggcgtctgaagtgaaaatagattatccgcagacgccatttgatagcgagctgttcgccgcggatgaaaaaagtgccatcgcccggcttcgcggcttctgccagcaaaaggccgccgactatgagcagcagcgcgatcttcccgccatcgaggggaccagccgactgtcgccgtgcctggcggtgggcgcgctctcaccgcgccagtgcctgcaccgtttgcgggttgagcagccgcgggcgctggatggcgaagccggattggtatggctcaacgagcttatctggcgcgagttttatcgtcacctgatggtttactacccaaacttgtgtaaggggcggccttttatcgactggaccgataacgtggcgtggctggacgataaatccgcgcttcaggcctggcagcgcgggcaaaccggcttcccgattgtcgacgccgcgatgcgtcagcttaatgcgaccggctggatgcataaccgcctgcggatgattgtcgccagtttcctggtgaaagacctgcgcatcgactggcggctgggcgagcgctactttatcgaacagcttattgatggcgatctggcggcgaataacggcggctggcagtgggcggcttcaacgggtaccgatgccgcgccctattttcgtatttttaacccgacgacccagggagagcgcttcgacaaagcggggcagtttattcgtcaatggctgccggagctggccggggtacctgaaaaagcggtgcatcaaccgtggctgtgggcggagaaacagggcgtaacgctggattatccgcgcccgattgttgaccacaagcaggcgcggctggcgacgctggcggcctgggaagccgccagagagcttaagactccatcgccaggcgacgagtccggatcttaacggcgtgatacagccagatagccagcaccaggccgacgcaggccagcgcgccccaggttatctggctgaacacctcaatgtaggcattaattgaatagttgacggccccggcggcgtcgaacgacccctgcgaggtttgatcggcaatcacgcctgccagatagttagcgatagcgccggagagcagcatataaataccggtcagcaccccggtcacgccggggatctcaatacgggtaatctgcgacatcgccaccgggtcgataaacagctcggcgaagcccatcaccgccaggcccagcaccatcagcggcattgaagattgtccgtaagccgccgaccagcgtgcgctgagggtcaggatacagaaaccggcgctcatcaggccgaggcccagcgcgaatttgccccagatgcgcacggtacggttgccgttaatattctccttcaccagccacgccagcaccaccccacagagcatcaccgcaaaggcgttcaccgactggaacatcgcggtcggtatctcatagcccataaaatgacgattaacaaaacggtcgatatagaggctgatggagctgccgccctgctgcgcaaaggcccagaacagcaggctgaagcaggtgagcaccataatcagacgcagctctttacgctgcctggcggtctccgcccgcaggtagatccgcgtcagtaccgccaggccgataaccgtcgccacaatcagcgcgtaaaccgaccactcctgccagaacagcacggtgatcagcagcggcgcggcgatcagcagcaccagcagccagccccagtttggtaagacgaaactccgcgcccgcagcgcttcgcgattcacgccccgggtgtggcggaaatggtgattgccgctgaggaaaatcaccagcccggcgatcatgccgacggccgccagcgcgaagcccatcgcccagctgtactcttcctgcacgtagccgcaggcgattggcgcaacgatagacccgacgttgcccgccgcgtacatcagcgaaaaaccgccgtcgcggcgcgggtcggtgggttcatacagctcgccgagcaggcagctgacgttggatttaaacagcccgtagccgcagacaataatcgccagcgacagatagaggaaggtgggggagatttcgctggcaccgagcaccagatggccgatggccatcagcagcgcgccgagcatcaccgccatgcggttgcccagcagcttatcggccaggaagccgccgagaatcggcgtgacgtagactaaagaacagtaggcgctgaacagcgcataagcatgattatcgtcatacttgagctggttggtgagataaagaatcagcagcgcgcgcatgccgtaaaaactgaaatattcccagatttgcagcgcgacgacgtaataaatcgcccgcggctgtgaggattgtgtgttcatgtaatgccttgtcctgccgtaaaaaagaaagtcgatctttctgcatgaatagccattaactagcgatattcatggccttatgggctttctggttatttaatatgctgtaatagtgcataaatatacacgaatgcgcgaacgagggagtagacaaattgcgggatttcgcgaaaagtcaaaatggacggcgaagcggcagaactatcgactgaccggacggataccgttatgttattcctctgtacagaacgaaaacctggtggaacggcaatgaaaaatagtgaactggaacaactgattaatgaaaaactcaatagcgcggccatcagtgattacgcccccaacgggctccaggtggaagggcgcgaaacgatacaaaaagtcgtcaccggcgtgaccgccagccaggcgctgctggatgaagccgtccgcctggaggccgatgcggtgatcgtccatcacggttacttctggaaaggcgaatcgccggtcattcgcggcatgaagcgcaatcgcctcaaaacgctgctggctaacgacattaacctctatggctggcacctgccgctagacgctcacccggaactgggcaataacgctcagctggcgtcgctgctcggcattaatgtgatgggggaaattgaaccgctggtaccgtggggcgaactgtcgatggcggtatcgggcctggagctggcttcatggattgaagcgcggctgggtcgcaaaccgctgtggtgcggcgacaccgggccggataaagtcgcccgcgtggcctggtgcaccggcggtgggcaaagctttatcgacagcgcggcccgctttggcgtcgatgcgtttattaccggtgaagtttcagagcaaaccatacactcggcgcgcgagcaggggctgcatttctacgccgccgggcaccatgccaccgagcgcggcggcattcgcgcgttaagcgaatggctgacggaaaataccgaactggacgtcacgtttattgatatcccgaacccggcctgatgaacggaggcaaaagtgcagcgagcgcgttgttatttattaggtgaaacggcagtcgtactggagcttgagcctccggtgacgctggaaagccagaagcggatctggcggttagcccagcggctggtaggccataccgaggtggtggaagccatcccgggcatgaacaacattaccgtgatattgcgcaacccgcagcagacggcgtgggacgcgattgagcgcctgcagctctggtgggaggagtgcgatacgctcgaaccggaatcgcgggaggtctcggtcccggtagtttatggcggcgaatacggaccggatctgggagaaattgcccgccacagcggcctgagcgaaaagcaggtggttgagctgcattcgtcggtggagtacgtggtgtggttcctcggcttccagccggggttcccgtacttcggcggcctgccggagcagctggcgatgccgcgacgggcggagccgcgcctgctggttcccgccgggtccgtcggtattggcggggcgcaaaccgggatctatccgctggcgacgcccggagggtggcagctgctggggcgtacgccgctggcgctgtttgatccgaagcgcaaggagccggtgctgctgcgttccggcgacagagtgcgtttcgtgccgcaaaaggagggcgtatgttaaaaattatccgcgccggaatgtatacctcggtgcaggacggcgggcgtgaagggctgcgtcagctgggcatcagccgctgtggcgctatggataagccggcgctggtcaccgctaatctgctggtgggtaacggcgctaacgccgcggcgctggagataacgctgggccaggtggatattcagtttgaacgcagcggctggtttgcgctgaccggcgccgcctgcgaggcgaagctcgatggcgagccggtatgggtgggctggcgaacggcggtcaaggccgggcagcatctggtgctcaagaacccgcagcacggcgtgcgcagctacctggcggtggcgggggggattgcggtgccgaaggtgctgggttcgcgcagcaccgatctgaaagtggggattggcggtctggaaggtcgacgtttgcaggacggagaccggctgaagctggggaaatctgataagcagttccgcgggccgcgcggcgtgaagcagctccccatcggcaaccgcatccgcgcgctgcccgggcccgagtaccaggagtttgatagcgtgtcgcaggacacgttctggcgctcgccgtggcagcttagcccgcagagcaatcgtatgggctatcgtctgcaggggcaaccgctgaagcggacgaccgaccgcgagatgctttcgcacggcctgctgcccggcgtggtacaggttccgcataatggccagcccatcgtactgatgaacgacgcgcagaccaccggcggctatccgcggattgcgaccattatcgaggccgatatgtaccagctggcgcagatcccgctgggacagccgatccactttgttccctgctccctggaggaggcgctgaaggcgcgcgccgacagacaacgttattttgaacagctggcatggagactgaacgatgaagattgatttaaacgccgacctgggcgaaggctgcgccaacgatagcgcgctgctgcagctggtctcttccgccaatatcgcctgcggtttccatgcgggcgatgcggtgatgatgctgcagtgcgtccgcgaagcgctgaaatatggcgtcgcggtgggcgcgcaccccagctttcctgaccgggaaaattttggccgtacggcgatgcagctgccgccggaaacggtttatgcgcaaacgctgtatcaggtcggcgcgctggcggcgctggtgcgcgcgcagggcggcgagctgcagcacgtcaagccgcacggcatgctctataaccaggcggcaaaagatccgcagcttgctgacgctatcgccaaagcggtatatgacgttgacgcgggtctggtgctggtaggcctggcgggcagcgagctgattcgcgccgggcagcgttatcagctgaccacccgccaggaggtcttcgccgaccgcggctatctggcggacggcagcctggtgccgcgcacccagcccggcgcgctgatcgagagcgaagagcagtcgctggcgcaaaccctggaaatggtgcagcacagccgggtgcgcagcatcaccggcgaatgggcgcacgtggtggcggaaaccgtctgcctgcacggcgacggcgagcacgcgctggattttgcgcgccgcttgcgcgcggcgtttgccgggcgcaatatacaggtcagtgcggaagtagaagaataaaaataatagtatcaagtaattaacattaaacaacaattcacaacaacatacaggatgtaactatgggagagtcattatctctctggccactgatcggcattgcggcgatcgtggtcggatttgttctgcgttttaacccggtactggtggttattgtgtccgggatcatcacgggtctggcggcgcatatgccgatcgcgaccattctggaaaagctgggagaaggatttcttaatacccgcaacctgccgtttattctgctgctgccgctggcggtgattggcctgctggagcggcacggtctgaaagagcgcgcgcagacgtggatcgcgaagatccgcagcgccaccgccggtcgtctgcttatcgtctatcttttcgtgcgtgaagtgaccgcggcgatgggcctcaccagcctgggtggtcatccgcagatggtgcgcccgctgctggcgccgatggcggaaggggcggcggagaaaaacttcggcgccttgcctggcgaggtgcgctatcgtctgcgcgcgatgtcggcggcgaccgacaacgtgggcctgttcttcggggaagatattttcgtcgccttcggggcgattatctttatgcataactttatgctggagtcgggcggcattcagaccgagccgctgcatatcgccctatgggggatcccaacggcggtctgcgccttcctgatccactctgcccgcctgtggcgcctcgaccgccatctccagcgcgagctggacaaggttaacgccgggcaggcgaaaggcggtgccgcatgaattttcagcaaacctggctgtactggctggcgggcgcggttctgctggcggtggcggtgatgtcatggcgcgataaggccaacccgcgcaggctgacaaccggcctgttctgggggctgtatggcctggtgtttctgtttggcgactggacctatgagctggtcggcgacaagcgggccgttaatatcggcgttggcgtggtggtggtggtgctggcgctgatcgccggttttggcggcgtgcgcctcggtcgctatcatcagcgctcgcaggaagaacgtaccgccagcgccgcgcgtcttggcaatcggctgtttttcccggcgctggcgatcccggtggtgacggtgatcggcgtgctgctgtttaataatctcccctcgctgcaggtcgctatctttggcccgggcaatcacgccacgctgatcacgctgttttcgatgaccgcgggcacgctgctcggtctggtgatggctatccgcatgacccatgaaacggccgcgcagccgttacaggaagcccgccgcctgctggactcggtgggctgggcgtttattttgccgcagatcctcgcggtgctcgggctgctgtttaccgccgccggcgttggcaacagcatctcctggctgacgcagcactacctggcggtagacagccggtttatcgctgttgccgtctataccctgggaatggcgctgctgacgatggtgatgggcaacgctttcgccgcgtttcctatcgtgacggcgggggtcgggatcccgattctggtgctgcagcacggggggaacccggcggtgatggcggccattggcatgttctccggctactgcggtaccctgatgacgcccatggcggcgaacttcaatatcgtgcctgccgcgctgctggagctgccggataaaaacgcggtcatcaaagcccaggtgccgaccggcgttatgctgcttatcgtgaacgtatttttgctctatttcctgatgttcctgtaaggagggatcatggctggcgtgttaattaccggttttgagccgttcggcggcgaagcggttaacccttcgtgggaagtggtaaagcggctggacggcgctattatcggcggacagccggtggcggcgcggcagctgccgtgcgtctttggcgacgccctgacggcgcttaacgccgcgttggatgagctggatcccgtcctgaccctggcgattggtcaggcgggcggtcgcgtcgacatcaccgttgaacgggtggcgatcaacgtcgatgatgcgcggatcccggacaataaaggcctgcagccgatcgacgtaccgatcgctgccggcgggccggcggcgtacttcagcacgctgccgatcaaagcgatcgtaaccgccctgcgcagccgggggatcccggcgtcggtgtcgcagacggcggggacgtttgtctgtaatcacgtgatgtacggcctgctgcacagcctgcgtcatcgcagcggcgcgaagggcgggtttatccatattccgtatttgccggagcaggccgcggctcatcccggcgaagccagtatggcggtagagacggttcaggccgcgctggaaacggccatcgccgttgccctgcagcaggatggcgatgtgaaagtcggcggtggggcaacgcattaacacaaggacaagattatgccggaaggtccggaaattcgccgcgcggcggatagcctggaagcggcgattaaaggcgaacccctgaccggggcgtggttcgccttcccgcagttacaacattaccaacctcagctggtcggccagcgagtgacgcacattgaaactcgcggtaaggcgctgctgacccacttctccggcgggctaacgctgtatagccacaatcagctgtacggcgtctggcgagtggtggacgcgggggcgcagcctgaaacgacgcgcgttctgcgcgttcggctgcagaccgcgcgcagggcgattttgctctacagcgcctctgatattgagatgctgacgcccgagcagctcgcccgccatccgtttttgctgcgggtcgggccggatgtgctcgatatgcgccttagcgttgaacaggtcaaagcgcggctgctgtcggcgaaattccgcaaccgccagttctccggtctgctgctggatcaggcgtttcttgccggattaggcaactatctgcgcgtggagatcctctggcaggtggggctgaccgggcggcataaagcctctgaactggatgaaaaacagctcgatgcgctggcgcatgcgctgctggagatcccgcgattgtcctacaacacccgcggtctggtggacgagaataagcaccacggcgcgctgtttcgctttaaggtttttcatcgcgaaggggaggcctgcgagcgctgcggcggaataatcgagagaacgatgctatcgtcgcggccgttttactggtgcccgggatgtcagcaataaaaaaacgcgccttcaggcgcgttttttgtcgctgcgatagccctcttaacgggcgatatcgtttttgaaatcgcgcttttcgtagccggtatacagctggcgcggacgggcgattttcatgccgtcgctgtgcatttcgttccagtgcgcaatccagcccacggtacgcgccatcgcgaagataacggtaaacatagaagacggaatgcccatcgctttgaggatgataccggagtagaaatcgacgttcgggtagagtttcttctcgatgaagtacgggtcgttgagcgcgatgtgctcaagctccatggccacttccagcagatcgtctttggtaccgagctctttcagcacttcgtggcaggtctcacgcataacggtggcgcgcgggtcgtagtttttgtacacgcggtggccaaagcccatcaggcggaaagagtcgtttttgtctttcgcgcgacggacgaattccggaatgtgttcaacggagctgatctcttcgagcatcttcagcgccgcttcgttggcgccgccgtgtgccggtccccacagggaggcaatacccgcagcgatgcaggcaaacgggttcgcgccggaagagccggcggtacgtacggtggacgttgaagcgttctgttcgtggtcggcgtgcaggatcaggatacggtccatggcgcgttccagaatcggattcacttcatatttttcacacggcgtggagaacatcatattcaggaagttacccgcgtaggagaggtcgttgcgcggataaacgaaaggctggccgatagagtacttgtaacacattgccgccatcgtcggcattttggagagcaggcggaatgcggcaatatcgcggtggcgtgggttattcacatccagcgaatcgtgatagaacgcggccagcgcaccggtgataccgcacatgacggccatcgggtgagaatcgcggcgaaacgcgtggaacagacgggtaatctgttcgtgaatcatggtgtggcgggtaacgatggttttgaattcgtcgtactgggcctgggtcggcttctcaccgttcagcaggatgtagcatacttccagatagttggagtcggttgctaactgatcgatcgggaaaccgcggtgcagcaggataccttcatcaccgtcgataaaggtgattttagattcgcaggatgcggtggaggtaaaaccagggtcaaaagtaaacacgccttttgaaccaagactacgaatatcaataacatcctgaccgagcgtgccctttagcacatccagttcgatagcagtatcaccacccagggtgatttttgctttagcatcagacatttatggtctccttagcgcctttattgcttaaggctgccgggtggtggatttgcattcagcccgtagcagatgacattaccagtttgttatgttgcacatcgctctgcgtcgcgaaaagggcagggtacagagcaagggcgcttgatggtacgtcttcagcctacgacgaaacaacagcaaatcagcgttttagcagcccgaatattataaaactatataccactaataactgtcctgattacatcggtcaatactctctcactgttgcataacttattctcaggtaaaagagtgaccccataacttttgcgtattattgcatttatctggtaatggttgtaacaataatgtttaatatttgtcaaatcagatgattaaaaattaaaaatatgttgttatcgtgacatggatcactgttcgggagaaaacccgacaaactatatgtaggttaattgtaatgattttgtgaacggcctatactgccgccaggtctccggaacaccctgcaatcccgagccacccagcgttattttgtcacgctttaactcctggaaaggcgttttaacatgacttttagttatagataaggacgctgtctgacccgcaagcagaccggaggaaggaaacaataagaacagcatgtgggcgttattcatggtaagaaatgtgaaaaaacaaagacctgtcaatctggatctgcaaacgatccggttcccaatcacggcgatagcgtccattctccatcgcgtatccggagtgatcaccttcgtggcgatcgggattctgctttggctgctgggcaccagcctttcctctcccgaaggttttctcactgcggcatccattatggatagcttctttgtgaagttcatcatgtggggcatcctgaccgcgctggcgtatcacgcggtggtcggtattcgccacctgctgatggattttggctaccttgaagaaaccctcgaagtagggacacgctccgccaaaatttcttttgttattactgtcgtgctttcacttctcgcaggagtcctcgtatggtaagcaacgcctcagcactaggacgcaacggcgtacatgactttattctggtccgtgctaccgctatcgttctgaccctctacatcatctatatggttggcttctttgccaccaccggtgaaatttcatgggaagtctggacgggctttttctcctccgcgttcactaaagtcttcaccctgctggctctcgtttccattctgatccacgcctggatcgggatgtggcaggtattaacggactacgttaaaccactggccgtgcgcttaattctgcaactgctgatcgttgttgcgctggtggcttacgttctttatggatttgttgtggtgtggggtgtgtaatgaaattgcctgtcagagaatttgatgctgttgtcattggtgccggcggcgcaggtatgcgcgcggcgctgcagatttcccagagcggccagagctgtgcgctgctctctaaagtttttccgacccgttctcataccgtttccgcgcagggtggtatcaccgtcgcgctcggtaatacccatgaagataactgggaatggcatatgtacgacaccgttaaggggtcggactacattggcgatcaggacgccatcgaatacatgtgtaaaaccggcccggaagcgattctggagctggatcatatgggtctgccgttctcgcgtctcgaaaatggcacgatttatcagcgtccgttcggcggccagtcgaaaaacttcggcggcgagcaggcggcacgtaccgctgcggcggctgaccgtaccggtcacgccctgctgcacaccctctatcagcagaacctgaagaatcacaccactattttctccgagtggtacgcgctggatctggtgaaaaacgccgatggcgcggtggtcggttgtaccgccctgtgtatcgaaaccggtgaagtggtttacttcaaggctcgcgccaccgtgctggctaccggcggcgccggtcgtatctaccagtccaccaccaatgcccatatcaataccggcgacggcgttggtatggcgatccgcgccggcgtgccggtgcaggatatggaaatgtggcagttccacccgaccggtatcgccggggcgggcgttctggtgacagaaggctgccgcggtgaaggcggctacctgctgaacaaacacggcgaacgtttcatggaacgttatgccccgaatgcgaaagatctggcgggtcgcgacgtggtggcgcgttccatcatgatcgaaatccgtgaaggtcgcggctgcgatggtccgtggggcccgcacgccaagctgaagctcgatcacctcggtaaagaagtgctggaatcccgcctgccgggtatcctggagctctcccgcacctttgcccacgtcgacccggtaaaagagccgattccggttatcccaacctgccactatatgatgggcggtattccgaccaaagtgagcggacaggcgctgaccgtcaacgagcagggcgaagatgtggttattccgggactgttcgcggtaggcgaaatcgcctgcgtatcggtacatggcgcgaaccgtctgggcggcaactcgctgcttgacctggtggtctttggccgcgcggtgggtctgcacctgcaagagtctatcgccgagcagggcgtactgcgcgacgcgacggatgaagagatcgacgcttctctggaacgtttgaaccgctggaacggcaaccggaatggtgaagacccggtcgaaatccgcaaagcgctgcaagagtgtatgcagcataacttctcagtcttccgcgaaggggatgcaatggcgaagggccttgagcagctgaaagccatccgcgagcgtctgaaaaacgcccgcctggatgatacttccagcgagttcaacacccagcgcgttgagtgcctggagctggataacctgatggaaaccgcttacgccaccgcgatgtctgcgaactaccgtaccgaaagccgcggcgcgcatagccgcttcgacttcccggatcgtgatgatgaaaactggctgtgccattccctgtatctgccagagtcggaatccatgacgcgtcgtagcgtcaatatggaaccgaagctgcgtccggcattcccgccgaagattcgtacttattaatgcggagacaggaatatgaaactcgagttttcagtttatcgttataacccggacgtagacgatgctccgcgcatgcaggattacaccctggaagcggaagagggtcgcgacatgatgctgctggacgcgttaatccagctgaaagagaaagacccgtcgctgtcgttccgccgctcctgccgtgaaggggtttgtggctccgacggtctgaacatgaacgggaaaaatggtctggcgtgcatcacgccgatctccgcgctgaatcagccgggtaagaaaattgttatccgtccgctgccaggattaccggttatccgtgatttggtggtagacatggggcaattctatgcacaatatgagaagattaagccttacttgttgaataatgggcaaaatcctccggctcgcgagcatctgcaatcgccagagcagcgtgagaaactcgatggtttgtacgagtgtattctctgcgcatgttgttcaacgtcttgcccgtcgttctggtggaacccggacaagtttatcggcccggccggcctgctggccgcgtatcgcttcctgatcgacagccgcgataccgaaaccagcgagcgcctcgaagggctgagcgatgctttcagcgtattccgctgtcacagcattatgaactgcgtcagtgtgtgtcctaaggggctgaacccgacgcgcgccatcggccatattaagtcgatgctgctgcagcgcagtgcgtaagtaacccggtctgccccggatggcgctagcgcttatccgggctaccaaaagcagtagccccggcagcgttcgcgccgccgggggatatagcaggaaacctctaaaaactgccatattaatagtaataatcgagatgttcagcgcgagacaaggcgcgagcagaacgaatctccgggagcatagtgaactatgtgaccggagtgagtgagggtcgcaacacagtcgcagcctgaacaaagaagattattagacagtttttaaaggttccttagcggacgaaaccacaactcatccgcaacaagtgaaccccggcacgtacaacttctgtgcgtggtagtttctacggcgaaataagcatataaatgcttaagggatcacgatgcagaacggcgcaatgaaagcctggctggactcttcttacctctctggttcgaaccagagctggatagaacagctctatgaagacttcttaaccgatcctgactctgttgacgccaactggcgttctatgttccagcagttacctggcaccggagtcaaaccggatcaatttcattccaaaacgcgtgattatttccgccgcctggcgaaggatgcctcgcgttacacttcttcgatttccgaccctgacaccaatgtgaagcaggttaaagtcctgcagctcatcaacgcataccgcttccgtggtcaccagcatgcgaatctcgatccgctgggactgtggcagcaagagagagtggcggatctcgatccggcttaccacgatctgaccgaggccgatttccaggagatctataacgtaggttcttttgccatcggtaaagacacgatgaagctgggcgatctgatctctgccctgaagcaaacctattgtggctccatcggcgcggaatatatgcacattacttctaccgaagaaaaacgctggatccagcagcgtatcgagtcggtagcgggcaaagcgagctttagcgccgaagagaaaaaacgcttcctgagcgagctgaccgcggcggaaggcctcgaacgctacctcggggcgaaattcccgggcgcgaaacgcttctcgctggaaggcggcgatgcgctgatcccgatgctcaaagagattatccgccacgcgggtaagagcggcacccgcgaagtggtgctgggcatggcgcaccgcggtcgtctgaacgtactggtcaacgtgctgggtaaaaaaccgcaggacctgttcgacgaatttgccggtaaacataaagaacatctcggtaccggtgacgtgaagtaccacatgggcttctcgtccgacatggaaaccgaaggcggcctggtgcacctggcgctggcgtttaacccgtcgcacctggaaatcgtcagcccggtggttatcggctccgtacgcgctcgcctcgatcgtctcgacgaaccgagcagcaacaaagttctgccgatcaccattcacggcgacgccgcggtcaccggccagggcgtggttcaggaaaccctgaacatgtccaaagcgcgcggttacgaagtgggcggtaccgtacgcatcgtgattaacaaccaggtgggattcaccacgtctaacccgctggatgcgcgttctaccccgtactgcaccgacatcggtaagatggtgcagtcgccgattttccacgtcaacgccgatgacccggaagcggtcgctttcgtgacccgcctggcgctggatttccgtaataccttcaaacgcgatgtcttcatcgacctggtttgctaccgccgtcacggccacaacgaagccgacgagccgagcgcaacccagccgctgatgtatcagaaaatcaaaaaacatccgaccccgcgcaaaatctacgctgacaagctggaagccgataaggtcgcgacgctggaagacgctaccgagcaggttaacctctaccgcgacgcgctggatgccggcgaatgcgtggtgcaggagtggcgtccgatgaacatgcactcctttacctggtccccgtacctcaaccacgagtgggatgagagctatccggacaaagttgaacctaagcgtctgcaggagctggcgaaacgcatcagtacggtgccggaagccgttgagatgcagtcgcgcgttgcgaaaatctatggcgatcgtcaggcaatggccgccggcgagaagctgttcgactggggcggcgcggaaaacctcgcctacgccacgctggtcgatgaaggtatttcggtgcgtctgtccggcgaagactccgggcgcgggaccttcttccaccgccacgcggtgatccataaccagaaaaatggttcaacctatacgccgctgcagcacgtccacaacggtcagggccattttaaagtctgggactccgtgctgtcggaagaagcggtcctggcgtttgaatacggctatgccaccgcagagccgcgtactctgaccatctgggaagcgcagttcggcgacttcgccaacggcgcgcaggtggttatcgaccagttcatcagctccggcgagcagaagtggggccgtatgtgcggtctggtgatgctgctgccgcacggctacgaaggccaggggccggagcactcctccgcgcgtctggaacgctatctgcagctctgcgccgagcagaacatgcaggtttgcgtaccgtccacgccggcgcaggtttaccatatgctgcgtcgtcaggcgctgcgcggtatgcgtcgcccgctgatcgtgatgtcgccgaaatcgctgctgcgtcacccgctggcggtatcgagcatggacgaactggctaacggcaccttccagccggcaattggtgaaatcgacgatctcgacccgaaagccgtgaagcgtgttgtgctgtgctctggtaaggtttattacgacctgctggaacagcgccgcaagaaagagcaaaaagatgtcgctatcgttcgcatagagcagctctacccgttcccgcaccaggcggtacaggaagcgctgaaaccgtatgcgcacgtgcatgattttgtctggtgtcaggaagaaccgctcaaccagggcgcgtggtactgcagccagcatcacttccgtgaagtgattccgtttggggcctctctgcgttatgcaggccgcccggcctccgcctctccggcggtaggatacctgtccgttcaccagaaacagcaacaagatctggtcaatgacgcgctgaacgtcgattaattaaaggatacataatgagtagcgtagatattctggttcccgacctgcctgagtccgtagctgacgcaacggttgccacctggcataaaaaaccgggcgatgcggttgttcgtgacgaagtgctggtagaaatcgaaactgacaaagtggtactggaagtaccggcttcagcggatggcattctggacgcggtgattgaagacgaaggcgctaccgtgctctctcgtcagatcctcggccgcctgcgtgaaggcaacagcgcgggcaaagagtccggtgcgaaagccgatgccaaagagtcgacgccggcccagcgccagcaggcttctctggaagaacaaaacaacgatgcgctgagcccggcgattcgccgtctgctggcggaacacagcctcgacgcggcggccattaaaggcaccggcgttggcggccgcctgacccgtgaagacgtggagaagcatctggcgagcgcgccggctaaagctgaagcgccggcggctgctcccgctgctgctgctgctccggcggcgcagctgggcaaccgctcggaaaaacgcgtgccgatgacccgtctgcgcaaacgcgttgccgagcgtctgctggaagcgaaaaactccaccgccatgctgacgaccttcaacgaagtcaacatgaagccgattatggatctgcgtaagcagtacggtgacgcgtttgaaaaacgtcacggtatccgcctgggcttcatgtccttctacgtgaaggcggtcgtggaagcgctgaaacgctatccggaagtgaacgcctctatcgatggcgacgacgtggtgtaccacaactatttcgacgtcagcatggcggtctccacgcctcgcggcctggtcaccccggttctgcgcgacgtcgatctgctgggcatggcggatatcgagaagaaaattaaagagctggcagtaaaaggccgcgacggcaagctgaccgtagacgacctgaccggcggtaacttcaccattaccaacggcggcgtattcggttctctgatgtccacgccgatcatcaacccgccgcagagcgcgattctgggtatgcatgccattaaagatcgtccgatggcggtgaatggtaaggtggaaattctgccgatgatgtacctggcgctctcctacgaccatcgtctgatcgacggacgtgagtcggttggctacctggttgcgattaaagagctgctggaagacccgactcgtctgctgctggacgtgtagtcagcaagagtatgacctaccgtaggccgggtaaagcgcgcgagcgccgttatcaggcctacaggtttataattattccctgaaggatggactgaacacatgaacttacatgaatatcaggcaaaacaactctttgcccgctatggcttaccggcgccggtgggttatgcctgtactactccgcgtgaagcagaagaagccgcttcaaaaatcggcgcgggtccgtgggtagtgaaatgtcaggttcacgctggtggccgcggcaaagcgggcggtgtgaaagtagtgaagagcaaagaagacattcgcgcatttgctgaacactggctgggcaaacgcctcgtcacctatcaaacagatgcgaacggccagccggttaaccagattctggttgaagcggcgaccgatattgataaagagctgtacctgggcgcggttgttgaccgtagctcccgtcgcgtggtctttatggcctctaccgaaggcggcgtggaaatcgaaaaagtggcggaagagaccccgcacctgatccacaaaatcgccatcgatccgctggcgggtccgatgccttaccagggccgcgaactggcgttcaaactgggtctggaaggtaaacaggttcagcagttcaccaaaatctttatgggcctggcgaccattttccttgagcgcgatctggcgctgatcgaaatcaacccgctggtgatcactaagcagggcgacctgatctgtctcgacggtaaactgggcgctgacggcaacgcgctgttccgccagccggacctgcgcgaaatgcgcgaccagtcgcaggaagacccgcgcgaggctcaggcggcgcagtgggagctgaactacgtcgcgctggacggcaacatcggctgcatggtgaacggcgcgggcctggccatgggcaccatggacatcgttaagctgcacggcggcgaaccggctaacttcctcgacgttggcggcggcgcaaccaaagagcgcgtcaccgaagcgtttaaaatcatcctctctgacgacaacgtaaaagcggttctggttaacatcttcggcggtatcgtacgctgcgacctgattgccgacggcatcatcggcgcggtagccgaagtgggcgttaacgtcccggtagtggttcgtctggaaggtaacaacgccgaactgggcgcgaagaaactggctgacagcggcctgaatattattgcagcgaaaagtctgacggatgcagctcagcaggttgttgccgcagtggaggggaaataatgtccgttttaattaataaagataccaaggttatctgccagggcttcaccggtagccagggtacattccactctgaacaagccatcgcttacggtacgcaaatggttggcggcgtaacgccgggcaaaggcggcaccacccatctgggcctgccggtgttcaacaccgtgcgcgaagcggtagaagcgaccggcgcaaccgcatccgttatctacgttccggcgccgttctgcaaagactccatcctggaagctatcgatgcaggcattaaactgattatcactatcaccgaaggcatcccgacgctggatatgctgaccgtgaaggtgaagctggatgaagcgggcgtgcgcatgatcgggccgaactgcccgggcgtgatcaccccaggcgaatgcaaaatcggcatcatgccgggccacattcaccagccgggtaaagtgggcatcgtttcccgttccggtaccctgacctatgaagcggttaagcagaccactgattacggcttcggccagtctacctgcgtgggcatcggcggcgacccgatcccgggctctaacttcatcgatatcctgaagctgttccaggaagatccgcagaccgaagcgatcgtcatgatcggtgagatcggcggtagcgcggaagaagaagcggccgcttacatcaaagatcacgtgaccaaaccggttgtcggctacatcgccggcgtgaccgcgccgaaaggcaaacgtatgggtcacgcgggcgccatcattgccggtggtaaagggacggcggatgagaaattcgccgcgctggaagccgctggcgtgaagaccgttcgcagcctggccgatatcggcgaagcgctgaaaaccgtaattaagtaataagtaaaaaaacagccctgacgttctgcatggttaagggctggtccaatttcgacatggttggccatctgatgatggccttttttttgcctgccgctgcgccatcaggcgttacgccgttttcgcccgcgatttcatgccgtttaatcatattcatctgcgcaaatgagattattttttgcgtccggcatcatcctttttatccgcactattttgcatattaagtgcttgcaaaaggcggtggggaataatgtggtgcgaaagaaaaggcatgaacaatgggagggctttagctcgctggcagcgcttttttcgcgggctaccgggctggagaccacggtgattgaggcgaatgacaatcgactacctgctggctatggtgggttaaatttctttgccttaccgctgattcaggacaatacattatccggttatattatttgcgaccatcataacgcgaccgacaaccagcatcgggcggcggcgataagattactgcattttatcgttaataatatgtctgcgattgcagaaaacaggcaagtggacgagaaaccgttgcggcataagagagagttttattattcgcaaaaatcgtcgcatgaaataaaactgctgtcggcattacgctatattgatgaaaatttatatggtgagctgtctttagagaccgtcgccgctcacgtttgtttaagcgcaaattattttagtcgtttttttaaaaaacgccagggggtgaattttaaagtctgggttaatcagcgcaaaatgcagcgtgccggagaactgcttggcgatccgtcatattcggtagacagcgtagcgcgtaagcttcagtttgcgcaaaccagctacttttgtcgggtgtttcgcgccgctcatcgcaccagcccgcagtcgttccgcgatcggcatctcgcagccgcttcacggtaagtcgattagccgccgttttatcgttaatacagatttttcctggagcgctcataatgtgtggccgatcgcggaaaaattttcatttatgctcaccagcgggcaattaaatttcaccgtctcatcgactgacttcgcaaataaacaagttaatgtgaaaaaatattgacaacttattgctgttatttgcatggcaatcacattgtttaaattgtgtttattgtagtgcctgggtattattggttattatttgatcaataacagtgtgcattaatcatggaatagatcaatgacatctgaaggtaaaataaaatataacacccggggctaatctgatgtccttgcgcgctttttttatctattaaacaattttttgcacgccgtaaatggaagacgttatgagaggaaaaatccccaaaactgaattactggtgacctttgaggttgtggctcgccacgaaagttatactcgagcagcggaagagttggctttaacacaaagcgccgtgttccgacaggtcacggcgctggaggatttcctccatacgtcattatttaatcatgctaaaaaaaggatttttttaaatgcggctggcaagcattatttgactatcgttaaggaaacgctaaacaaactggaacgtgataccaactccattatgacatggcaaccgacggtgcaggtgcttgagctggccgtcaatcctacctttagcacccactggctgatccccaacctgcgcgagtttaataaattacatccgggcattatcgttaatattcattcgctggctaatattggcgattttcttagccgcgagtacgatgccgccattatgcgcgaggacttttgctcgccgtgggcggaggttgagtatctgttcgaagaggaaattctgccggtgtgcggctgcgggctgctgtccgaacccgggcagaagctggcggtcgaggagctgctgggcgagtttccgctgctgcatcaaagcacgcgaattcacggctggcaggagtggtttgcgctgtcgaatatcaccagcccgcagatcaacatcggtccgcgttttgacctgctctcaatgctgattgcggcggtgcgttcgaacctgggggtggcgctgctgccgcgttttgccattcagcatgacctggatagcggtgagatggtgatcccctgcgatgtaccgattcgcaccggcaaccgcttcattatgacgtggcaggaggataaagcggaatcccgacatttacaggtattccgcgagtggctgctgcaaaaatcggtggtctcggcagcctgacggcgcgttgtcagcgccgcagacggcggtgccgggcgcagagtggcatcatttcccggaggcgatgctgcgcatctgtccgggctaccggcccgcagacggcggtgaacccgtagcccgggcaaggcgcatcaagcgccgcccccgggagcatagcgcagagtggctgaatttcccggaggcgatgctgcgcatctgtccgggctaccggcccgcagacggcagtgaacccgtagcccgggcaaggcgcgtcgagcgccgcccccgggagcatagcgcagagcggcatcatttcccggaggcgatgctgcgcatctgtccgggctaccggcccgcagaacgctgtgaacccgtagcccgggcaaggcgcgtcgagcgccgcccccgggagcatagcgcagagtggcatcatttcccggaggcgatgctgcgcatctgtccgggctatcggcccgcagacgaatgtgaacccgtagcccggctaagcgtagcgcgagccgggtaaaactaccagtcgattcccacctgcgcctgaataccgctgtcaaaggcgtgcttcaccggacgcagctcactaaccgtatcggcaagctccagcagccgggcgtggcagccgcggccggtgacaatcacgttctgccgtggcggacgattctctatcgccgcgatcacttcctgagtatccagatagtgatacgccagcatataggtaagttcatccagcaccaccagatcgtagctcgggtcggccagcatgcgcttgctctcctgccatacggccgacgccgcctcgatatctgcctcccggttttgcgtttcccaggtaaagccggtgcccataatgtgaaactcaacgcccagaggatgcagtgtgttgtactctccattatcccactggcctttaatgaactgggcaacaccgacgcgcttaccgtggccgacggcgcgcgttgccgtaccgaaggcggcggtggatttaccttttccgttgccggtgaagacgatcagaatgcctttttgctccgttgccgccgccacgcgggtagcaacctgcgttttcagcttctgctggcgctgacgatggcggtcgggattgcctcgcgcgtgcataaatgctccttagtgtcctgccggacaggtggcgcagcggtgctgctgctcgaactggctaaagaagttgttgcctttgtcgtcaaccagcacaaacgcgggcagattttcgacttccatcatccataccgcttccatgcccagctccggatactccaggcagcgcaaacttttcacatactgctgcgccagtagggccgccgcgccgccgatgctgccgagattaaagccgccgtgtttatggcaggcctcggtcacctgctggctgcggttgcctttggaaagcatgatcagactgccgcccgccgcctggaaagcgtcaacatacccatccatgcgtccgccggtggtggggcccagcgagccgcaggccagattattcggcgttttcgccgggccggcgtagtagacaatatgcttgcgcatatactccggcatcggttcgccgttatccagacgcgctttgatttgggcatgggcgatgtcgcgggcgacgacaatcggaccgctcagcgatagccgggtgcccacgggcagggctgacaggtcgtggaggatgtcgcgcagcggccggttcagatcgagctggacggtctgcgccccgttttctatgcgctgagaatcagggataaacttgcccgggttatgttccagcttctccagccagatgccgtgtttgttgattttggctttgatgtttcggtcggcggagcaggaaagcgccattgcgatagggcaggagccgccgtgccgcggcaggcgaatcacgcgaatgtcgtgggcgaagtatttgccgccaaactgtgcgccgatgccgaactcgcggctggctttgagcagcgccgcttccagcgacgtatcgcgaaacgcctggcccagttcgtttccgctggtgggcagattgtcgtaatattttgtcgaagccagcttcgccaccttcaacgcctggtccgccgacaggccccccaccacaaaggcgatgtggtacggcgggcaggcggcggtgcccagcgccttcattttttcaatcaggaaggcggtgagtttttccggctgcagaatagattttgtttcctgaaatagcgcggctttgttcgccgaaccgccgcctttattgacgaagaggaagcggtattcactgcccggcaccgcgctgatatcaatctgcgcgggcaggttggtctcggtgttgacctcggtatacatatcaaggggggcattttgcgaatagcgtaaattgttttcctgaaaggtggtgtagatgccctgactcagagcttccgcgtcgttgcctccggtccagacgttctggcctttgctcgcgacgatggtggcggtcccggtatcctggcagtttggcagcacgccttttgccgagacttcggcgttgcgcagcagctgtagcgcaacgtatttatcgttgccgctggcctgcgggtcgtgcaggatgctggcgatctgctttaagtgcccggcgcgcaggaaaaacgacgcctcataaaatgcctgctgagccagcaatgttaacgcttccggcgcaaccttgatgacctcttctccatctaactctgtcaccttaacatgttgattcgttagcagttcatattcggtattatcgttgctctgaacaaaaagttcctgccagacaaagggtttcgacattttacttctcactatttcgctaaaaagagattggcccgcgtcgcattcgcgacgtactcgatggtctgctgggcgcggacgctgttgccggctgcatccagcggaggggagtagacggcgatagcgtattgcccgggaacgacggcgaccattccgccgccaacgccggattttgccgggataccgacggtgtacagccatttgccgctgccgtcgtacagcccggcgatcgccatttccgccagcacctgcgggacgtagctggcggtgagcagctgcttgccgttgaacggtgatttgccattgttggcgagtacggcccccattttggcgagctgctcaacggtgatatccaccgaacactgacgggtgtagatttcgacggcttcctgagggtcgccatagaagctgcggtatgaattcatcagcatcgccagcgcctggttatgctgattggtctccatttcggattgaaataccggctcgttaacgctcagggagctgtcggcccaggcgttgaggttgttgagaatgttgttccagcggtcggttttgtctttcgccgcaatcaggctcacggtgctcatggcgccggcgttgactaacgggttctccggcgcgccttgcgtgagctcgacggctaagccggaattgaagggcaggccggtcgcgttcgcgccgagtttatccagcacctcctgcggcccgcgctgctccattgccagcgccagggtgaaaactttacttaaggattccatcggaaaggcttttgtcacgtcgccggtctggtaaattttgccttcgaccgtcgcgagcgtaatggcgaaattattcgggctatagctcgccagggcagggatatagtcggcgactttaccgtcgtgattactcttatatttctgatgtgcctgctcgatgatgctggcgtagtccggcgcgctttgcgcctgcgcggcggcgctaaacagtaagctggcggttaagatgcaggtgccaagaaatttcacgttcatggggtgtcccgttgggatgattggagggaaccgggccggacgtatccggcctggggctcatagccattttgctgtcaggacatcgccacttctgacgtttcgctggcagggcgctcctgctccggttttttgaccggggcggtgccgcggcagccttctccgtaatgctcgccttcccaacggccaacgatggcggcgcccatggcgttactcatcacgttggtggcggagcgacccatatcgaggaacgggtcgacgcccatcagcaggatcaggcccgcttccggaatgttgaactggttcagcgtcgcggcgataaccaccattgaggcgcgcggcacgcccgccatccctttggaagtcagcatcaggatcagcagcatggtgatctgctcgcccatgctgaggtggacgttacaggcctgggcgataaacaccgtggcgaacgagcagtaggccatggagccgaccaggttaaaggagtaaccgatgggcaggacgaagctggcgattttggaagagacgccgaatttttccagcttatcgagggttcctgggaaggcagcttctgagctggatgtggtgaaggccagcagcgcgggctcgaagatcgctttggtcaggcggctgatacatgggccgacaatcaccgtcgacaggccaatcaggattgcccacagcatgcccagcgtcaggtagaactcacccataaagatcccggcgctgaccatcacgccaagaccgcgctcggcaatcagcccagagatggcggcgaaaacggtcagcggcgcgaacagcatgacgtaccctgtgagcttcagcatcacgtggaccagcgaatcgagcaccttcacaatgggctcggctttttcgccgatcgccgccaggctgcagccgaggaaaatagagaacaccacgatttgcagaatttcgttgcgcgccatcgcatcaacgatgctggtgggtaccgcgtgcgagataaacactttcagggtgaagggctcggactgaacggcggccacggctccggcatcgtgggggacaaagttgatgcccgcgcctggctggaacagattgacgatcaccagacccagcgcaatcgacagcagcgaggcgcaaataaacaggaaaaaggttttagagaatatgcgcccgagcgttttcgcatcgcccattttggcgatgccgaccaccagcgttgatattaccagcggggcgataatcatttttaccaggcgtaaaaatatagtggtaaaaatggagatatcctgcgcataggattttgctgtatctgctgatgccatattattaatgatcaccccggcaatcatgccgagtatcaggcctaatatgatcattttggttaaacttatttttttcatatttactccatcggaacagggttagtcgtgaagtggtgtagggcggcgtacgcctgcgccaggcagcagcgcagacgtacgcctgtggtgactaaccgcataaattgtctggaatacagtgatacagcgaaatcctgtataccaatggatgttgttgtatttttatatccgtcgtctttcaatctgcatttttgttggctgcctttgctcacccctgtcacgtacggatgtaagctcctggggatgaatgagggacatccatgtccctcaccgaaggcagcctccggctgttcaaattcgttcctgacgaatttgtctctcagttgccgcctcaatgcaactcgaaatccattggatatagaattagaaatcgaactcaatacttaatagcggcgcatgctgctgagcaccataaacatcattgtccccgacgttgccggaaataatatcccgcggcatgacgatttttaccgcgttggccggatcgaaccagataatgcgatgaataaaatcaggctttacgttatataagccggcaataagctgcggggttaattgctcagaacgtttgacccgctgataatcttcccgggttttaaataaaatatctaaaaccagttcatacggtccggcgtttttggagcggatcacctgcgccagtgagcatagggattgtttcatgcctgaactccttctggcgtcacctgttcgatatggaagtcaaagcgcagcgcgtcgctggcttcgatcaggtgatagattgagaactcatacaccggaccgctctgaatatcggaaggcgagaacgggaaggcgaggttgcccgcggtggcaatgcggttttcatagccgtagtgcagcagggtagagcgcaccagcgaacagacgctgttggcgatatcctgggttggcgcaacgacatcaagcaggatgcccagttcgtgcccggcggttttcatcggttcgtgattgcccatcacgccgttctttccatacagatggaaggtcatgcggatgctgtcatcgttcagggagaggttgcgtgcgacgctggtctgtacctcttcaagaatattatcgattccggcaatcatgatcggatcgcgcgttccggcaatggtcaggcagcggaaaccgacccgccgcgcgccttccagcttcagcgcgtacggcgtcgcttcatgacgagaaccgctgacgtaaacctcgccttcgttgacggctttgaaggtgcatcctttcaggttcagcacgccgcccggaccgggcaggaaatacggatcggacttctcgtacagcgtatgcgccgccgcagaggtttcggtaaacttacgctttggattaaacgctttcagcgtaaagccgctgtcgtcgataatccccatggcgcagtcggaaccggagcccggcgtggcggcaatggccgcgcattcgaggatcttgccgcagtgcagggcgagcccctcgtcaaagccctgcataatcggcagcgccgcgaagcaggccggatcgtacgcccggccgccaagcaccacctgggcgccggctgccagcgcccgctgaaagggttcgatccccatctgggcgacgatataggtactctcttcaatggcctcgtgggtcagttcaggcacaaagtccagggcggtgattttgccgttatccagcgcctgatgaacgatggctttatcgacatcagacgggatcagcgccatggagaacgacagtttttcttcctgcgcaatctcatggataatctgccgacaccactccagatgcggcgcggcgccggatcctccagcggtaccgatcaccaccggaatgttgttcttcacgccggcgacgatcatatagcgcagatcgcgtttcaccccggcccggtcggtaaaaggtttgcctgcccccagatagtgggggccgggatcggatgaaccggcgtcaacggcaatcagatccggcgatgcctccatagctttacgaaagctctcttccgggaagccatagccgaggattgccgtcggcgataagatcttaaaggtacgagccatctcttaatccttagtctgcaacagcgcgatggtgcggttcatttcgttaaacacgatgttaagaccttcgtcgaagcccatgcccggcttgatcagcatgcgcatcggacgcgcggccagcgcgacgtgaacgcaggtgcgggcgctgatctcggtttcgttacaggtaccgccctgataggcttccatcgcgtgtttgttgcagtacagcaccgcgtccacgatgttatgaatgccgccgagatccggggttttgatctgcaccatgtggcagctgccggcatcggtaaagtcaacgatgtcctgataggtgttacaccactcgtcggcgacaatttttacgccggaaccgaggcgggtcagctctttggtgatggccgtgagcatacggatctggtccggtttattacccgcatccaccgggccttctatgtagagcggcaggccctgcgcctcttgctccaggctggcgatatagtcggcgcagcgaaccggatccatattgaaaatcaggccgatggtgccgtacacgtcgatatgcagcgtggggcgatagcgggggctggtgcgcaggcttaagatgcggtcggatagccagcggacatactcacgcagtttttcccctttgagacccagcttctcttcgacgttgttaatgagcgcatgcggcaggacgtcaacgcctttgaggatcattttgtccacggcgatgtagcggtcgtcgccgctctgaccaaataacggaatcgcttccggtatgcagggcagctgccattcgtcgcaaaccacctccgccttcaggcggccgctggccagcgcggtggcgtcgagcagcgcctgggaaagaccgtagcggacggcggtatgcagcagatgaccgtcgatgcgcagcttgtcgaagaagcgggcgttcggcaggaaggtatcgacatcgcggccctccagcagcggtttgatatgatcgttgaggaacgggataaagttctccgccaggaacagcgggtcgcggccgcccgcgccggagtactgtacggcggcacagtcaccgaccgccaccgcgccgttttccagaatcagctggacggatacgcattcacccgcctggcgtaccgaggtgaagcctggcgttaccggagcaccggtataaatgaacccatcatgacccgcgccgtttttaatcgcctgctgatcgtcaaaatagaatgaagagtagccagcggtgaaaagggcctgtttaattttcattatggtcttcctattaatttactgtgggataccgcgttgatgtcatcaacaaccatctggaatgagggtttgcgtccttcaaaatgcgcacgttcagcgacgtaatcgtggtgcagggcgaggatgtccttcggcagcggaaccgcgccggcttcaagcacgcgaatggcgccggcattgtcgcgaaccggcaaaattttgcccgcgttgcaggatgcgggggcaaaaggcacgtccaggacgcccgcttcaaaggccagcaccgtaccgcgggcgatgtcgccgttgcccagctcgaacactttcttcagcaccgcgcgaacctcgctttttatcagctccacttcctgctcaaccgcggcgcagggcgggaacttctgatcgctgaccatattgagcatctggcgggatgccctcagcccctgcgcgttggccgccgcggtgggaataccgaacgcttcatgcgggctcttggtgatcactttggtggcgccggacatcccggctaccgccgcgccccaggagataatggcaaaggcttttgattcatcttccggaaagccgcccatccactggtggaagacggtactcagctcgtaatcgtcgaatccataattgccaaagtattcgtgggagagttcgcgaagagatttaatcgccgcgatgtcctgggtgaggctgccgacctggccgtagccgacggtgattgacttgacgccctgttccagcgccagcagaccttcgataatggccaccgcgtgggacataaacggtgggatcagggtgccggtcagcgggccgaacggttcgcggttaatacgaatgccgtgttcttcatacaggcccatcaggcggtcgcagtactgccagtcgcgaatcgacttctccagggtgacgcgcttggcgtagggaatgttgtaggagataccgccgccttcgtagctggtaaagccgctggccatggagatttccgccagcaggcgcgcgtctggcgtaccgtgacgtacctggaccggtttttccagcgcttcggtcatccggcggcaggcggcgacgccgtggttaaccaccggcaaaccattcagtttggaggttcccgcctcgatggatttctgtatgccgaccgccgcttcttcgtaacggttgaggcgggtataggcatcgatggtgctgggcagcagatcgcactcttcctgcagggttttgagcagcgcaatatgttcatccatcagcgccacgcccgcgcgcggctggctcagggttttaccctcctggtcggccttaagcagagcgtgagaaaagcgttttttctcaggaatggtttgctggtacttcacgccatcttcgaagtgctcaacgtccttgccggtatgccaggtctgcaatacctgatgccgctcggtcatgaattcgtcgtgggttaattttttatttcgaagttccattcgtagctgccttcatttatagggttaaacagtgaatgctggtgcgagcggcgagctcggggtagagcctggcaacgtttgccagcagcggaagcaggccttttgcatcgcggtaataatcaaaccgggttggcaggagaatgcgtctgccgtcgtcatccagttcgcggtatttcagccagcggtggatgtcgaagccgctggcgcgggagagccatccaccggaaccgacgactttacgcacgggggtcagatcgcggcccatctgtaaatcgacgttgcccacgcaggtgcagacctgctttttggtgcccgcgtggcgttcgctggcgtagccgacgcacagcccggccagcacggtgtcgaaatatttttcttcctcgttgagcggcagataatccggctgagcgaccagatggcgcaggtagcggtaaaaggcctcctgacgctgcggctggtgggcaaacaccacgttcaccagctcctgagtactttcaccgaccacgacagctgaaacgcgcatgccgagatcgccttctaccgtacgtttaacaaacggttccggaaccccgtgcagaacggtatccggagagagcgtgttggcgctggcggagtagacgtcggtggtggcgccgcccatatcgatcagcatgaactctttccacgcgctgtcgtaatggctgatggtttttaccagctcgtagacggtccacggcgttggcatcggctcttcgccggtttccgcgacaatcacgtccagccctttacctttgacgattcgggataagaagacatcgcaaatcgccttgcgggcagcgtagggattagggtgatcgagatcgggcagaatgttgtctaccgtggtcaaatctttgtggccaaggatggcctgaacctcgtcctgaatatcccggtttccggcatagataatggcgcagtcgagcgttgactccgccagcgcatgggcgttggccaggccgtagctctcctcgccgccgtcggttccgccggtaaatagcaggatatccggcggcgtggcttccagcgcctggatatcgtggcggttgagtttgtaggcgtagtattgggcgattttggcccccgccgagtgggcggtgacttttgctgattccagggtgatggacggcaccagacccatcgcggcaacggcaagaccgccttttgccgatgaagagtatttcagcgtgacgtcaccgcggtgcagcaacgggcgcgcatcggcaacgttaagcacccggttcaggctggcaaaaaagccttccgccaggtgatgggtagtggtcggggtcagaacgtgatttaccagcgtcagctcatccccctcctgtgcgaagagggccgctttggtccacgtcgagccgatatcgacagagacggtttgcatcagatagcctcttccagacactgctgttcaacgccgtggcgctggttgatatcgttcgccatcagcctgcagacgtcttccagatcgtggcttggggcaaagacgcgattgaagcccatctctttgaatttggcctcgacgtcggcaaaatcatgcttaccgaccaccaggttaccgccaacgtaaagaagaatatcgccgataccgcgttcgatgcagcgttcgcgcagtcccaggcagtcgatatcgccgtggccgtaaatagacgacacaacgatggcgtccgcgccggtttcgatagcggcatcgatatattcatcctgactgaccatcacccccagattgattacgcgaaaatcatgggcagtaaaaacgcggtccaggactttgttgcctactgcatggcagtcagcaccaatgacgccaataacaagtgttgatttcttcatgggtaatcctctgtaaggctgatggtataaaaataaaaacgactttctaatatttgcagcgttgatgatggccgcctgttaatagggctggagtgtctgtggttcgaaggggggaagcaattgatctattttcagaatatctttcaaaaaagtcttgtttttgatttttctttaaaaaatccttttctatcatatagttgttgatttcttattgtctgggggttatttctgtttagatctttttaataaatagattgcgatgtttgtgagcaaggtcttattttatattttgcctttgataataagcggtaaatacaattctttaaatttttctgtgaacatagtaacggaatttatgtgcggttttttatatgcgtcacggcaaatttgttagattaaagatataaaatgatgatttgtttatttaatatttcatttttgttgaatggcggagtggggcaggagagctgctttccggggtggataaaagcgtagggggaaagtctgctgcataaagagcagggtgcgttgcgtcacaaaacgacaagaaagagaatgtacgccgcatttacttgataatgagatagttacgcatctgtgttaattgaaagtaaacgcaatgataaatgtaataagcaaaaaatttagggcattaacttgataaaaaaaatctgtgagctacacgacattgtcagctgatgcccggattaatgcgcccagcgctcatcccattaaattcccctccgcggcgaaataaatggactatcattttcagtaaccgttgatactcttgaaaaacatattgttaacctagtgtttacctgtacggtacacggtatacataattaacatttaaaatgaaaattgatttaaatcaatgtttaaaacttggaaaaggtcgcgaaatggagttaaattgtcgcggatcaaattgaccgaaatctggtattttcgctataaattgatcgctgtcgaaaactgcaaatttatcacaataaaaacctatttattgtaagggttttgcagcgtaatataatcacgggatcaatttgggtgttttgttaacatgtttgtaacttctcattactatcgttttcttgcatgagaaaacgggcgtgacgagaagaagcaaataaatttgtattggggcatgcgtgtgaccctttctaacggggttcactctcggagtcttcatgcgatgagcaaggagtcatgatgttagatatagtcgaactgtcgcgcttacagtttgccttgaccgcgatgtaccacttcctgtttgtgccgctgacgctaggtatggcgttcctgctggccatcatggaaacggtctacgtcctttccggcaaacagatttataaagatatgaccaagttctggggcaagttgtttggtatcaacttcgcgctgggtgtggcaaccggtctgaccatggagttccagttcgggactaactggtcttactactctcactatgtgggcgatatcttcggtgcgccgctggccattgaaggtttgatggccttcttcctcgaatctacctttgtcggtctgttcttcttcggttgggatcgtctgggcaaagttcagcacatggccgtgacctggctggtggcgctgggctccaacctgtcggcgctgtggatcctcgtcgctaacggctggatgcagaacccgattgcgtcggacttcaactttgaaaccatgcgtatggagatggtcagcttctctgagctggtcctgaacccggttgctcaggttaagttcgttcataccgtggcgtcaggctacgtgaccggcgcgatgttcattcttgccatcagctcctggtatatgctcaaaggccgcgacttcgcttttgccaagcgctccttcgctatcgcagccagcttcggtatggcggcgattctctccgttatcgttctcggtgatgaatccggctacgaaatgggcgacgtgcagaaaaccaaactggcggctatcgaagctgaatgggaaactcagcctgctccggcggcctttaccctgtttggtattcccgatcagaaggcgcaggagaaccgcttcgcgattcaaattccttacgcgctgggcatcattgcgactcgatccgtggataaacaggttaccggcctgaaagacctcatggttcagcacgaagagcgtatccgtaacgggatgaaagcttacgcgctgctggaacagctgcgtgccggttcaaccgaccaggccgtgcgcgatcgctttaacgacgtgaagaaagatctgggctacggtctgctgctgaaacgctataccgacaacgtctctgacgcgacggaagagcagattgctctggcgaccaaggactctattcctgccgtggcgccgctctacttcgccttccgtattatggtagcgtgcggcgtgctgatgctgttgattatcggcgcctccttctggagcgtgattcgcaaccgcatcggtgagaaaaaatggctgctgcgcgccgcgttctatggcctgccgctgccgtggattgccgttgaatcgggctggtttgtcgccgaatatggccgtcagccgtgggctattggtgaggtgctgccgacggccgtcgcgaactcgtcgctgaccgcgggcgacctgatcttctctatggtgctgatttgtggcctgtacacgctgttcctggtggctgaactgttcctcatgttcaagtttgcccgtaaaggaccaagcagcctgaaaaccggtcgctaccactttgaacagtcctctgcggctattcagtcggcacgctaagacaggagtcgtcaaatgatcgattatgaagtattgcgttttatctggtggctgctgatcggcattttgcttattggttttgccgtcgccgatggcttcgacatgggggtggggatgctcacccgtttcctcggtcgtaacgacaccgagcgtcgaattatgattaacgccattgccccgcactgggacggaaaccaggtgtggctgatcaccgccggcggcgcgctgtttgccgcctggccgatggtttacgccgccgcgttttccggcttctatgtggccatgatcctggtgctggcgtctttattcttccgtccggtgggtttcgactaccgctcgaagattgaggacaaccgctggcgtaacatgtgggactggggcatcttcgttggcagcttcgtgccgccgctggtgattggcgtggcgttcggcaacctgctgcagggcgttccgttccacgttgatgaatatctgcgcctgtactacaccggtaacttcttccagttgctgaatccgtttggcctgctggccggtattgttagcgtggcgatgatcctgacgcagggcgcgacctacctgcagatgcgtaccgtgggtgaactgcacctgcgcacccgctccgtgtctacggtggcggcgctggtgacgctggtctgcttcgcgctggcgggcgtttgggtctactacggtatcgacggttatgtggtgaaatcggtgatggatcataccggcccgtctaacccgctgaccaaagaagtcgcgcgtgaagccggcgcgtggatggtgaactttaataacatgccggcgctgtgggcgattcctgctctgggcgtggcgctgccgctgttgaccgtcatctcgacaaaagcggataaaggcgcatgggcgtttctgttctcctcgctgacgctggcgtgcatcattctgactgccggtatcgccatgttcccgttcattatgccatcaagcacggcgatgaacgcgagcctgaccatgtgggatgcgacctccagccagctgacgctgaacctgatgacttacgtggcgattgtcttcgtaccgattattctggcctacaccgcctggtgttactggaaaatgttcggtcgcatcactcgcgaagacatcgaaaagaacacccactcgctgtactaaggtaaggagctatatatgtggtatttcgcatggattttgggaacgcttcttgcctgtgcttttggggtgattaccgcgctggcgcttgagcacgtggaagccaccaaagcaggtaaagaagaacactgatgagtattatcgtgatgcgatatacgaaatcattcgggttgcatcgaggcggcaagtctgtgaatccccaggagcttacacaagtaagtgactggggtcagcagacgtagccaacaaagaggcgacgtgaatgataaagtatatgtatgcgataatggacaagcgcccgttaagggcgctttccttattgatggcgctggcgctagcgggctgtatcttttgggatccgtcgcgctttgcggccaaaaccagcgagctggaaatctggcacggcttcctgctgatgtgggcggtttgtaccggcgttatccacggcgtgggcttccgcccgcgcgccattcactggcagggaattttttgtccgcttatcgctgatattgtgctcgttttgggcctgttctttttcttcttttgaataagaaatctctgttaaccatatgggcttgcataagcccataaaaatttactcctcgtttactttcccccattccaaaccacgattcccgcgcgtatagtagcgaagtttgaaagcactaaccttttgttgcattaccgggatgtaaagtgaatacaacgctgtttcgatggccggttcgggtctattacgaagacaccgacgccggtggtgtggtttaccacgccagctacgtcgctttctatgaaagagcacgcacagagatgctgcgccatcatcacttcagccaacaggttttgctggctgaacgagttgcctttgtggttcgcaaaatgacgctggagtattttgcgcccgccagactcgacgacatgctcgaaatccagacggagataacctcaatgcgaggagctaccctggttttcacgcagcgaatcgtcaacgccgagaacgtcgttttgaatgaagctgaggttcttatcgtgtgcgttgatccactcttaatgaagcctcgtgcgcttcccaagtctattgtcgcggagtttaagcagtgactgagatgaatatccttgatttgttcctgaaggcgagccttctggttaaacttatcatgttgattttagtttgtttttccatcgcctcctgggccatcattattcagagaacgcgtatcctcaattcggcgtcacgtgaggccgaagcgtttgaagataagttctggtccggtatcgagctttctcgtttgtaccaggaaagccagggtcgtcgcgataatctgaccggttcggaacaaatcttctacagcggcttcaaagagtttgcgcgtctgcatcgtgcgaacagccatgcgccggaagcgattgtcgaaggagcgtcgcgcgccatgcgtatttcgatgaaccgcgagctggaaaccctggaaacccacatcccgttcctcggtacggtgggttctatcagcccatatatcggtctgtttggtaccgtatgggggatcatgcatgcctttatcgcgctgggcgcggtaaaacaggcgacgctgcaaatggtcgcgccgggtatcgcagaagcgctcatcgcgacggcaattggtctttttgccgctatcccggcggttatggcctataaccgtctgaaccagcgcgtgaacaaacttgagctgaactacgacaactttatggaagagttcaccgccattctgcaccgtcaggcgtttaccagcagcgaaagcaataaggggtaagccatggccagagcacgtggacgcggacgtcgcgaactgaagtccgagatcaacatcgttccgctgctggatgtcctgttggtgctgttgctgatctttatggcgacagcgccgatcattacgcagagcgtagaggtcgacctaccggacgcaacggagtcgcaggcggtgaaaagcaacgatgagccgccggtgatcgttgaagtctccggcgtcgggcagtacagcgtgaaagttggcccggaaacgttatcgcagctgccgccggaacaggttattgcggaagccaggcgtcgacttgaggcgaatgagaaaacggtgttcctgatcggcggtgctaaagaggtgccatacgatgagattattaaagcgcttaacctgttgcacagcgcaggggttaaatcggttggcttgatgaccaagccgatctaatcgctcgcaatatgcacgcccgccagcacgtcggctttgggacaacagcgtctcgtggccgacgtcatataacgggaacaggcgaacagtttttgggaaccgatagtgtcaaaggcaaccgaacaaaacgacaagcttaaacgagcgatcatagtatcagtcgcgctgcacatcgtattgatagcgctgctgatctggagttcgtttgacgagcatctggatgcttctgccgggggtggcggaggttcctctatcgatgcggtaatggtcgatccgggggcggttgtgaagaattatgaccgtcaacagcagcagcaggccagcgcccgccgcgccgccgagcagcgtgaaaagcaggctcagcagcaggcggaagagctacgtgaaaaacaggccgccgagcaggaacggctgaaacagctggaacaggatcgtctacaggcgcaggaagcggctaaagaggcgaaagaacagcagaaacaggcggaagaagccgcggcgaaagccgccgcagcggccaaagccaaagcggacgcacaggcgaaagaggcgcaggaagctgccgccaaagccaccgctgacgcgaaagcgaaggccgatgcgcaggcgaaagcagccgaagccgctgcggcgaaagcggcggcggatgcgaagaaacaggcggaagcagaagccgcgaaagcggccgcggacgcgcagaaaaaagccgaagccgatgcggcgaagaaagctcagcaggaagctgagaagaaagcgcagcagcaggcagagaaaaaagcgcagcaggaagcggcgaaacaggccgctgctgaaaaagctgccgccgaaaaagcggcagaaaaagccgccgcgcagaaagctgctgctgagaaagcggcagccgagaaagccgccgcagcggaaaaagccgccgctgagaaagccgcggcagccaaagctgcagcagcagagaaggccgccgcagacaaagcggcgaaagccgccgccgctaaggcagcagccgccaagaaagccgctgcggccaaagaggccaacggcgttgacgatctgctcggcgacctgagctccggtaagaatgcgccgaaaggtaataccagcggtagcgctgggggttcatctcctgctaaaggaagtaagcaggggcagggtggggcatcccaggctgagattaacagctatatttcacaggtgcaggctgcgattaaaggtcatctctatgactgggatacctacaaggggaaaacctgtactttacgtgtgaatctggctcaggatggaacgctgttaagtgtgaaatcggaaggcggcgatccggcgttctgtcagcaaatgctggccgcaacgagccggatgacgaagttccctaaaccgccgtcgcaggctgtttatgaaacattcaaaaatgcgccactggacttcaaacctcagtgatagttttccccgtttatgcggggaaaacaaacgtcggtaggcccagggttttggtagttttgtgtatttgagtttgttaacattctgctaaattatcgtgggcttttcgcctggataagggagatatgatgaagcaggcattacgagtagcatttggttttttaatgctgtgggcggcagtgctgcacgcagaagtacgcatcgagattacccaaggggtcgactcggcacgcccaatcggcgttgtgccgttccagtgggcggggcagggtgctgcgccggaagatgtgggcggtatcgtggcggctgacctgcgcaacagcggcaagtttaatccgctcgatcgctcgcgtctgcctcagcagccgggtagcgctcaggaagtacagccggcggcatggtctgcgctgggcgttgacgccgtcgtggttggtcaggtgacgcaaaaccctgacggttcctacaacgtggcgtatcagctggttgataccggcggcgcgccagggaccgtgcttgcgcagaactcctttaaagtcacgaaacagtatctgcgctatgccgcgcatgctgccagcgacgccgtatttgagaagctgaccggtattaagggcgccttccgtacccgtatcgcctacgtggtacagaccaacggcggccagttcccgtacgagctgcgcgtgtccgactacgatggctacaatcagttcctcgttcaccgttcaactcagccgctgatgtctccggcatggtctccggacggcgcgaagctggcctacgtgacctttgaaagcggacgctctgcgctggttgtgcagacgctggctaacggctccgttcgtcagattgcttcgttcccgcagcataacggcgcgccggcgttctcgccggacggcagcaaactggctttcgctctgtcgaaaaccggtagcctgaacctgtacgtgatggacctgggatctggccagattcgtcaggtgaccaacggtcgcagcaataacaccgaaccaagctggttcccggatagccagaacctggcctttacttccgaccaggccggtcgtccgcaggtgtataaagtcaatattaatggcggcacgccgcagcgtattacctgggaaggttcacaaaaccaggacgctgacgtgagcgctgatggtaaaactatggtaatggtaagctcggccggtggtcagcagcacattgccaaacaagatctggaagcgggtggtgtgcaggttctgtcatcaacgtttttagatgaaacgccaagtctggcacctaacggcactatggtaatctacagctcttctcaggggatgggatccgtgctgaatctggtttctacagatgggcgtttcaaagcgcgtcttccggcaactgatggacaggtaaaatcacctgcctggtcgccgtatctgtgataataaataattgattattaaaggaatcaaagaaatgcaactgaacaaagtgctgaaagggctgttgatcgctctgccggttatggcaatcgcggcgtgttcttctaacaagaacgccagcaacgaccagagcggtgaaggcatgctgggtgccggcactggtatggacggtaacgctaacggcggcaacatgtcttccgaagagcaggctcgtctgcagatgcaacagctgcagcagaacaatatcgtttacttcgatctggacaaatacgatatccgttctgacttcgctgcaatgctggacgcgcacgcaaacttcctgcgcagcaatccgtcctacaaagtgaccgtagaaggtcatgcggatgagcgtggtacgccggaatacaacatcgctctgggtgagcgtcgtgctaacgccgttaagatgtatctgcagggcaaaggtgtttctgctgaccagatctccatcgtttcttacggtaaagaaaaacctgcagtactgggccatgacgaagcggcttacgccaaaaaccgtcgcgccgtactggtttactaagagaattgcatgagcagtaacttcagacatcatctattgagtctgtcgttactggttggcatagcggccccctgggccgcttttgctcaggcgccaatcagtagtgtcggctcaggctcggtcgaagaccgcgtcactcaactcgagcgtatttccaatgcgcacagccagcttttaacccaactccagcaacaactctccgataatcagtccgatattgattccctgcgcggtcaaattcaggaaagccagtatcagctgaatcaggttgttgagcgccagaagcagatcctgctgcagatcgacggtctgagcagcggtggcggcgcagcgggagcgcaaacccagacgtcagcgggcgatcagggcgctgcggctagcgggacggcgccagcggcctcgtcaggcgccccggcgcagaccggtgatgccaataccgattacaacgcggctatcgcgctggtgaaggatccctctcgccaggacgatgcgatggcggctttccagaacttcgtcaaaaagtaccccgattcaacgtatcagccgaacgccaactactggctcggtcagctgaattacaacaagggtaaaaaggacgatgcggcgtactatttcgcttccgtggtgaaaaactaccctaaatccccgaaggcgcccgatgcgatgtttaaagtcggcgtgatcatgcaggacaaaggcgataccgcaaaagcgaaggcggtttaccagcaggtggtcagtaaatttcctggcaccgacggggccaaacaagcgcaaaaacgccttaacgcactcggatgattatggcatgaccagaaatcgcatcatttctggtcttgtcgcatgaatcctaagcagttaagcaatctttatctaaattgttgttgcgctgaattctgaaatcagtaatatatgccgccgttgccaagggatatcgaacaagcccaaagcggcgaaaatagtgggtcgttagctcagttggtagagcagttgacttttaatcaattggtcgcaggttcgaatcctgcacgacccaccaatcgttctggtggaacgcgatagtaaaacgtgaaggataacgttgcgtcagcaacggcccgtagggcgaggcgaagccgagtcatcctgcacgacccaccgttaaaagatgtatccagcgcagtatcgggtgattagctcagctgggagagcacctcccttacaaggagggggtcggcggttcgatcccgtcatcacccaccactcgggtcgttagctcagttggtagagcagttgacttttaatcaattggtcgcaggttcgaatcctgcacgacccaccaatttaacatcaaactcagatgttaagcgtgaaggataacgttgcgtcagccacggcccgtagggcgagcgaaagcgagtcatcctgcacgacccaccaatttcgaattggtgacgagtgaagaatattcaggcagtacccgagcgggtcgttagctcagttggtagagcagttgacttttaatcaattggtcgcaggttcgaatcctgcacgacccaccaatttaacatcgcagtcagatgttaagcgtgaaggataacgttgcgtcagcaacggcccgtagggcgagcgaaagcgagtcatcctgcacgacccatcatcctgaatcgttccagttagcagtaaacccgcaaggggtcgttagctcagttggtagagcagttgacttttaatcaattggtcgcaggttcgaatcctgcacgacccaccaatttaacatcaaactcagatgttaagcgtgaaggataacgttacgtcagcaacggcccgtagggcgagcgaagcgagtcatcctgcacgacccaccaatgtaaaaaagcgccctaaaggcgcttttttgctatctgccatttcctcgaaaatcacaacaatccgcaataccttaatactgcgttattctaccgtcgcgctgcgtttaccgtggctacaattggcacaggccagcagcccggacagatgcgtagcatcgcctccgggaaatgtgccgggcctgatgcctttgcgtggcttcgtcccgggggcggcgcttgacgcgccttgcccgggctacagattcgtgcgttctgcaggtttagcagcccggacagatgcgcagcatcgcctccgggaaatgtgacggcctgatgcctttgcgtggcttcattccgggggcggcgcttgacgcgccttgcccgggctacagattcgtgcgttctgcaggtttggcagcctggacagatgcgcagcatcgcctccgggaaatgctccctgtgggaaaaattcctcacgacattttctgcacaatcggctatcttgtttagcatataaaacaccatgaccggttaatacctttcttcaggcattattacggtctgaaagttaagccagtgaaacgagactgcaagatgagcgtaatgtttgacccggaagcggcgatttatccttttcctccgaagcccatgccgttaaaccgcgatgagaagcacttttatcgcgaaaaaattaaacgcctgctgcgcgagcgcgatgcggtgatggtggcccattactataccgaccccgaaattcagcagctggccgaagagaccggcggctgtatctccgattctctggagatggcgcgcttcggcgcccgacattctgcctcgacgctgttggtcgccggcgtgcgctttatgggagaaacggcgaaaattctcagcccggaaaaaaccatcctgatgcccacgctccacgcggagtgctcgctcgatctgggctgcccgatcgaggagtttagcgctttctgcgatgcgcatccggatcgtacggtcgtggtctacgccaatacttcagcggcggtaaaggcgcgcgccgactgggttgtgacgtcgagcatcgccgtggaactcattgagcatcttgatagcatgggtgaaaaaatcatctgggcgccggaccgccatttaggcagctatgtgcagaaacagaccggcgccgacgtactgtgctggcagggcgcctgcatcgttcatgatgaattcaaaactcaagcgctggcgagaatgcgggcgctttatccgcaggccgcggttctggttcacccggaatcaccgcaggcgattgtcgatatggctgacgcggtggggtcaaccagccagttgatcaatgccgctaaaacgctgccgcacaagcagctcatcgtcgccaccgaccgcggcattttctacaaaatgcagcaggcggtaccggaaaaagagctgctggaagcgcctacggcaggcgaaggggcaacctgtcgcagctgcgcccactgtccgtggatggcgatgaacggcctgcaggcgattgcggaagggctggaaaagggaggcgttgaacatgaaattcacgttgatgaacagctgcgaaccggggcgctggttccgctaaacagaatgctcgattttgcggctacacttcggggatagctcattactgcgttacagaacgctctggggataagatggatttttttagtacgcagaacatattagtgcatatacccattggcgccgggggatatgacctgtcgtggattgaagcggtcggcaccgtcgcaggattgctgtgcatctggctggcgagcctggagaagattgccaactatgcctttgggctgatcaacgtcacgctgtttgccattatcttctttcagatccagctctacgccagccttctgctgcagatctttttcttcgcggccaacgtctacggctggtacgcctggtcacgacaaaccagcgataaccaggcggaactgcaaatccgctggctgccgctgccgaaagcgttaggctggctggcggcctgcgtggtggcgattggcctgatgacggtatttatcgatccggtttttgcgtttctcaccaggattgccgtcgcgctgatgcacaccctgggcctgcaggttgctatgccggcgctgcagccagacgcgttcccgttctgggactcctgcatgatggttctctcggttgcggcgatgatcctgatgacgcgcaaatacgtcgaaaactggctgctgtgggtgattatcaacgtcatcagcgtggttattttcgccctgcagggcgtttatgcgatgtcgctcgaatatctgctgctgaccttcatcgccctcaacggcagccgtatgtggattaacagcgcgcgtgagcgcggctctcacgcgttttcccgctaatggtgatgatggtgtccatgcccggcgtgcgtcatgttcagacggcactccgggccgctgcagggctgatactccatctgaaccgtaatgtgttcaatttcatacttatgctgtaagaagccctggattcgttcaagcaggccgtcgtgatcgtgcggcggtaccacctgcacgtgcagcgtcatcaccgttttttctccaaccagccacgcatgaacgtggtgtacgtcgcgaacttccggtatcgagcggcgcaaatcgcgctttaaggcgtcgacgtcaagcgaacgcggcgcgccctccagcagctcattaacgctctcctgcagcaaacgccatgcgctgcgcagaaccaggcacgataccagcacggacagaataggatcgataggcgtccagccggtggtgatgatcacgattgcggcaataatggccccaaccgaaccgagtagatcccccagcacatgcagagcggcggcccgcacgttgaggttacgctcttcactgccgcgatggaggatccagaaggccagaatattggccagcaggccggcaacggcgatgatcatcatggttttaccggctaccggttgcggatgatgaaaacgctgaatggcctcccagacgattaatatcgtaatgaccaccagggcgatagcattgagaaaggccgccagcgtggtcagccgcagccagccaaaggtgtgttgagcattaggcgggcgactggcgaaacgcacggccagaaaggcgaacagcagcgctgcggcgtccgtcagcatatgcccggcatcggccagcagcgccagcgaacctgaaatgagtccgcctgcaacctcaaccaacatgaatccggccgtgacgcagaacgccagcagcagccgacgggcattattatcttcggtggattgcggagaattatgcgagtgtgattgccccatggtgccatccctacattattattttgatgattactttatgacatgattcacctcttggggtgaataaaatgaaaaaaggagagccttagctctccttccgggcggataccgcgcagattattgggtggtaccgtcggttttcgtcgcctcgtcctggccgacctttttatcggtatccgggcagcggccatctttgcacattgagtttttgtggacttcatcgctcgacatcccgtcgtggttcatggtcgagccgttggggtggagcatggtgccgccggtatcggtggaaccggcgttaatgttaccgttgtccacgttgtttggcgccacgttttcacgcgcgtcgggggcgacctgacccgcgtcggctgccgaattggcctgcccgttgttcgactgcgcgccggtatcggcggccagcgccgcgccgctggccaggcccagggttgctgcgaggagaagactggttagcttgttcattttcattggatgctcctgttatatcgatttaccgaattacctcttccaacagtgcattgccggaggttctactcgttgtagttaaagcttcgctgttagcgatcggcattaatatataatgctgaatgctaaagaaaattaagttctaacagttaaaaattatagcttgtggccactattccgcgactttatggcgttttttagcctatttccaggaatattctgccgctactgtaaaatcacgtttacactttttgagcgaagagatagattggagggattgcatttaactagataagtatggcaacgctggaaataagatgaattatcagaacgacgatttacgcattaaagagatcaacgaattattacctcccgttgcgctcctggaaaaattccccgctaccgaaaacgccgccaacaccgttgcgcatgcgcgcaaagcgatccaccagatcctgaaaggtcatgacgatcggctgctggtcgtgatcggtccatgctccattcacgatccggcggcggccaaagagtatgccgagcgtctgctcgcgcttcgcgaagaacttaaaggcgagctggaaatcgtgatgcgcgtgtattttgaaaaaccgcgcaccaccgtgggctggaaagggctgatcaacgatccgcatatggataacagcttccgcatcaacgatggtctgcggatcgcacgcaagctgctgcttgatattaacgacagcggactgccagcggccggggagttcctcgatatgatcaccccgcagtatcttgccgacctgatgagctggggcgcgattggcgcgcgtaccaccgagtcacaggtgcaccgcgaactctcttccggcctctcctgcccggtaggctttaaaaacggcacagatggcaccattaaagtcgctatcgacgccatcaatgccgccggcgcgccgcactgtttcctgtcggtgaccaaatggggacattcggcgattgtgaacaccagcggcaatagcgattgccatattatcctgcgtggcggtaaagagccgaactacagcgcgcagcacgtggcagaagtgaaggtgggtctggcgaaagcaggcctgcccgctcagatcatgatcgatttcagccatgccaactccagcaaacagtttaaaaagcagatggatgtcggcacagacgtatgccagcaggttgccggcggcgagcgggcgattatgggcgtgatgatcgaaagccatctggtggaaggcaatcagagtctcgacagcggtgagccgctggcctacggtaaaagcattactgatgcctgtatcgggtgggaagataccgatacgctgcttcgccagctggcgaatgcggtaaaagcgcgccgcggttaggttttacggcgagtctcaaaataaaaaagcgtggagggctccacgctttttttacatcccgcgaaaattacttcgctttaccctggttcgctacggcagcggctttcgcggcgatctcgtcggcgttacccagatagtaatgtttaataggcttgaagttctcgtcgaactcatacaccagcggtacgccggtcgggatgttcagctcgaggatctctgcttcgcccatgttgtcgaggtatttcaccagcgcgcgcagggagttaccgtgagcggcgataatcacgcgctcaccgcttttcagacgcggcagaatggtttcattccagtacggtacgacgcggtcgatggtcagcgccaggctctcggtggtaggcagctcagcgtcggtcagttttgcatagcgcggatcgtgacccgggtagcgctcgtcgtctttggtcagctccggcggcgttaccgcaaagccgcgacgccactgcttaacctgctcgtcaccgtatttttcagcggtttccgctttgttgaggccctgcagcgcaccgtagtgacgctcgttcagtttccatgacttttctaccggcagccaggcctgatccagttcgtccagcacgttccacagggtgtggatggcacgtttcagcacagaggtataagcaaagtcgaagctgaagccttcttctttcagcagcttaccggccgcttttgcttcacccacgcctttttcagacaggtcaacgtcataccaaccggtgaaacggttttcgttgttccattggctttcgccgtgacgaacgagtaccagcttagttacagccatacacttactcctcaatacacgtcatctttctcgccgctttgatgcgacccgaaatctgtagtgtgtatatttattgattgataactattctcattatattgccgcgacttacctcacggcaatgcttatccctaaccatagcgaaaatagtcgctcagtgtaaggtgcttgtaaaacagaggttatgtttttgtctgtaagtggcgtatttttcagcgaaaggataaaaaaagccctccatcaggagggctggatattatttcgcaataaactgatattccgtcaggctgacgtactcttcgccggggcgcagtacgcaatccggctgcggccattccggatggttcggtgaatccggcaggaactcgctctccagagccagaccttgccagtcagcgtaaggctgcgcggtgcgcgacggcgtgccggccaaatagttgccggagtagaactgcagcgccggagcggaggtatagaccgtcatctgcagcttttcgtcctgcgaccagacgtgagccgccgggcttttggcatcgcccagcgcctggagcagaaaggcgtggtcgtaacctttgaccttttgctggtcttcatcgcgcaggaaatcgtccgccagcatcttcggcgtgcggaaatcgaagctggtcagggtgacgttttgcaaatcgcctcccggaataccgtcgctctcaacgggcagatacgcatcggcaaagatttgcagcctatggctacgcacgtcgctctgcacgccatcaagattgaaatagacgtggttggtcaggtttaccgggcagggctgatcaacggtggcgcgatactcgatggcgatacgattatcgtcggtcaggcggtagtgcgccgtagccgtcagattgccggggaacccctgatcgccatcgtgggaggagagtgaaaacagcgcgtgacgatcgtcggcgctgacaatctgccagcggcgcttatcaaatccttcaggaccgccgtgcagctgatggccggcctcgttggagggcgtcagattaacgctatggccatcaagggaaaagcggctgttggcgatacggttcgcgtaacggcctacggaagcgccgagataggcggcctggcgcgtatagtcgccaggggtcgcgcagccgagcagcgcttcgcgtacgctgccgtcggccagcgtcacgcgcgcggagagcagcgtcgcgccccagtccattacggtgaccgtcatgcctgcgtcgttacgcagggtgaggagattccacggctggccgtccggcgccagctccgttgttgggtttagcattgtccagctccctgcgacggtttgcagacgtaaaaggtctctttgataccggttttcgcttcatactctttggcaacggcctgctgtacggtctcgaccagatcttccggcaccagggcgacgatacagccgccgaaaccgccgccggtcatgcggacgccgcctttatcgccgatggtcgccttgacgatgtccaccagggtatcaatctgcgggacggtgatttcaaaatcatcgcgcatggaggcgtgggattccgccatcagctcgcccatccgcagcagatcgcctttttccagcgccgcggcggcttctacggtgcgggcgttttcagtcagcacgtggcgaacgcgtttggcgaccaccgggtcaagctcgtgggcgacggcgttgaactcttgcaacgtgacgtcgcgcagggccggctgctggaagaaacgcgcgccggtttcacactgttcgcggcgagtgttgtattcgctgccgaccagagtgcgcttaaagttactgttaataatcaccaccgcgacgcctttcggcatcgagaccgctttggtccccaaggagcggcagtcgatcagcagcgcgtgatcttttttaccgagcgcggagatcagctggtccataatgccgcagttgcagccgacgaactggttttccgcttcctggccgttcagcgcgatttgcgcgccgtcgagcggcagatggtacagctgctggaacacggtgccgacggcgacttccagcgaagccgaagagcttaaccccgcgccctgcggcacgttgccgctgatgaccagatccgcgccgccgaaagcgttattccgctgctggagatgcttcaccacgccgcggacatagtttgaccactgctgggcatcgtggctggtaatcggcgagtcgagagagaattcatcggtctgattgtcgtaatcggcggcaatcacccgcacggtacgatcgtcgcgcggcgcacaggcgatgaccgtctggtaatcaatggcgcagggcagcacgaacccatcgttatagtcggtatgctcgccgatcaggttaacgcggccaggggcctggataacatggctggccggatagccaaatttctcagcaaacagggcttgggttttctctttcagactcatggttatactccggattcgcgaaaatggacgtcgctcacagcgcgcagacgttcggcggcctgctcggccgtcaggtcacgctgggtttcagccagcatttcatagccgaccataaatttacgcaccgtcgcggagcgcagcagcggcggataaaaatgcgcgtgcagctgccagtgatcattctcttcatcgttaaacggcgcgccgtgccagcccatagagtaggggaatgagcactgaaacagattgtcgtaacggctggtcagctttttcagcgccagtgcgaggtcgctgcgctggtcatcggttaaatcagtcaggcgctgtacgtgcgctttcggcaacagcagcgtctcgaagggccacgctgcccagtaagggaccaccgcgagccagtgttcggtctcgacgacggtgcggctaccgtcggctaattcgcgctgcgcgtaatccaccagcatcggcgcgccgtgctcggtgaagtacgctttttgcagacgatcttcgcgttccgcctcgttaggcagaaagctgtttgcccacacctgaccatgcggatgtgggttggagcagcccattgccgcgcctttattttcaaagacctgcacccacgggtaggtttttccgaggtcggcggtctgctcctgccacgttttaaccacgccttccagcgcctccacgctcagttccggcagcgttttgctgtggtctggcgagaagcagatgacccggctggtaccgcgggcgctctgacagcgcataagcgggtcgtcgctttccggggcgtcaggggtatcggtcatcaaagccgcaaagtcattggtaaaaacaaacgtaccggtgtagttcgggtttttgtcgccggtgacgcgggtattacccgggcacaggaaacagtccgggtcgtgcgcgggcaaggtctgttttgccggcgtttcctgcgccccctgccaggggcgcttggcgcgatgcggagaaaccagaatccactgcccgattaacgggttataacgacgatgtggatggtcgacggggttaaatacgctcatgaaggttccttagtcgggataaccctgcggatgacgggactgccagtgccaggtgtcctgcgccatttcgtcaaggttgcgcgtcacgcgccagttcagctcgcgatcggccttttcagcgtccgcccagtaggccgggaggtcgccttcgcggcgcggtgcgaagtggtagttaatcggtttgccgcaggctttgctaaatgcgttgaccacgtcgagcacgctgctgccgacgcctgcgccaaggttatagatatgcacgccggctttatcggccagtttttccatcgccgcgacgtggccgtctgccaggtccatcacgtgaatgtagtcgcgtacgccggtgccatcttcggttgggtagtcgttgccgaataccgccagcgattcacgacggccaaccgcgacctgcgcgatatacggcatcaggttgttcggaataccctgcggatcttcccccatatcgcccgacggatgcgcgccgaccggattgaagtagcgcagcagcgcgatgctccagtccggctgcgctttttgcaggtcggtcaggatctgctcaaccatcagcttgcttttaccgtaagggctctgaggcgtaccggtcgggaagctttcgacgtaagggattttgggctggtcgccgtagacggtcgcggaggagctgaaaataaagtttttcacgcccgcggcgcgcatggcggaaacgagtttcagtgtgccggttacgttgttgtcgtagtactccagcggcttagcgacggattccccgacggctttcaggccggcgaaatggatcaccgcttcaatggcgtgatcgtggagaatttccgtcatcagcgcttcgttacgaatgtcgccttcgacaaaggtggcgcttttcccgccgagacgttcaatgattggcaatacgctgcgcttactgttgcagagattgtcgagaataatcacttcgtgtccctgcagtagcagttgaacgcaggtgtgacttccaatgtaaccgctaccacctgtaaccagtactttcatgattcgctccaataggcttatcgtgtgagaagaagatagcataccaaagaagccaaaagtgtgacacaggccaaattggtggaatcgtttacactaaaatttttaaacagcccatttgagtttttttgttttaaaaacagggtgatgttatgtctggtagctattattctgaaaaaaacagggatcagcagacccctgtacaggcttaattttacagcggatccagctggtaagtgtaaccgtctccactactcacaaaggccagtcggtgggtgatacagtccggggcgtcttcggcgtgatgagagacaaacagcagctgcgtcgccccttcgccaatcagcacatcaacgaagcggcgcaccagctggcggttgagcgggtccagcccctgcagcggttcgtcaaggatcagcagagtggggtgtttgaccagggcgcggacgatcagcgccagccgctgctgcccccaggagaggctatggaacggcgcatcggcggtgcgtttgtcgatacccagaatatccagccagttctgcaccagcttatgctgcttgtcggaaacggcctgatagatgccgattgagtcgaagtagccggagagaatcacgttacgcacgttggtgctgacgcggtattcaaggtgcaggctgctgctgacgtagccaatatgctttttgatatcccagatggtttcaccgctgccgcggcggcggccaaacagggtcaggtcgttgctgtatccctgaggatggtcgccggcgatcaggctgagcagcgtggatttaccggcgccgttggggccgactatctgccagtgttcgccagggttcaccgtccagctcaggcggttaataatcggacgatcgttgtacgaaactatgccgtcgttcagcacgatgagcggcgcttcggcgtccagcgcaagacgcgctgccggtgcgtcgggctccggcagcgtcatgccgtcaagcttttcgctatgcgcgagctgggcaataagcgcctgctgcagcagggcctgcttttcgccggtttcgctcagcacgcagtccgccagtaccccggcatactgaacgaacgccgggatctcgtcaaaacgattgaggaccagcaccagggtgataccttccccgttcagcgcggccaacatcccggcgagctgctggcgcgaggcgacatcaagaccgtcgaacggctcatcaagaataagcaggtcgggatcgcccatcagcgcctggcacagcagggtcttgcgcgtttcgccggttgagagatatttaaaacggcgttcgagcaggtggctaattgcaaactgttcagcaaggcgggcgcagcgggaggggtctttaaactcatcctggataatttccgccgtcgtgcggccggtgtcttcttctcccgggctgagcaaatcggtgttattgcgctgccactcatcgctgaccagcttttgcagctgctcaaaagagagacgggtgatgcgcgagaaggtgcactcacgctgcccgcttagcagggtcagctcgccggagagcgcccgcgcaagcgccgatttcccgctgccgttgctgccgacgaaagcccagctctcgccagcctgcacgcggaggtgttcaatatttaacgtttttgtatcgctaagacgaaacgtgccttgcgaaatttgcaacaatgacattgtgtatcccactttttgcagcgatttgcttcagggatacgtcttcgcgagcgcaatgtcaatgccgttagcacaacgtggcaagaatgatgcgatcggcattaaaatatgctatcacctccgccccttccgccagatcgcgcgtctgttccaccggcagggtggcgcaaaggctctgcccatccgggagcgccatcagcacttcacactgttccggcccgcgttcgatgtggttgatacgtccggccagctggttgtcggcccgttccgcctgtgcggcatcctgagtaatgccaacccacggcgctttcagcagcactagtacttcctggccttcctcaaggcccagacgatcggcgctttgggcggtaatcgcgaccttaaagcgggtttggccgtcggccagcagaacgtcaacgtgctgctggacctgctgatggtcgcggccggtaatggtgccgaaccactggttgcgcgcgctggtctgcagagagaatcgcgaaatggcagccagcaggctgtcgaggggaagggcgtcatcatcgctcaggacatcgaacgctttctgctgaatctgcgccagcaggtcgtagagctgaatcagccgctgcccgtagcgggtgaggaccgcgccgccgccgcctttgccgccggtcgcccggtcaaccagggtctgctcgctgagctgattcatttcattaatcgcatcccaggcgcttttatagctaatgcccgcgttttttgccccctggctaatcgagccggtctgttcaatctgtttcagcagggcgatacggcgaggatcggcgaacaggcgctgctgtaatttgagggtaagaagaatttcagcctgcataatcatatcctgatgaaaaagggtattgtgaccgatagcggtcatcttgcaagatgcatctctcacggtggccagcggggcaccgcacaaatggggcgtgtttttccggctgaattggttacaataaactattcgtactttctggagccaaccatgttagagctattgaaaagtctggtttttgccgtagtcatggtccctgtggtgatggcggtcattctgggcctgatttacgggctgggcgaagtgtttaacctcttctccggagccggtcataaagacagcagaccgcaaaatcactgatttcccccgcgcccggttctgccgggcgttcttatttcttcccccctccatttttcgaacgctgattacccctaattttcgctgggaaaaacctggcgctatcgttatattgtctactacataacgaactgacgggagattcagatgacaggtcaatggttacgcttttttgccggagcaacgttaacgctctccattgcgggccacgcgctggcggaagagggcaaagtgacggtttttgccgcggcatcgctcaccaacgccatgcaggatatcgccaaagagtataaaaaagagaagggcgtggaggtggtttcttcatttgcctcttcatcgaccctggcacggcagattgaagcgggggcgccggcggatctgtttatctccgccgatcaaaaatggatggattacgcggtcgagaaaaagagcattgataccgcctcgcgcgcgacccttctcggtaacagcctggttgtcgtggcgccaaaagccagcgcgcagggcgagataaacatcagtgataaaaccgactggaccagcctgctgaagggcggccgcctggccgtaggtgacccggaacacgtgccggctggcatctatgcgaaagaggcgctgcaaaagctgggagcctgggaaaccctgtcgccgaagctggcgccggcagaagacgtgcgcggcgcgctggccctggttgaacgcagcgaagcgccgctggggatcgtttacggctccgatgcggtcgccagcaagggagtaaaagttgtcggtaccttcccggaagattcgcataagaaagtggaatatcctctggcaatcgtcgacggccataaaaatgccacggtcagcgcgttttatgactatttaaaagggccggaagcgtccgctatctttaaacgttacggatttactacccactaatgttcttaagcgatcctgaatggcaggcggtactgctgagcctgaaagtctcctccctggcggtggtactgagcttgccttttggcatctttttctcctggctgctggtgcgacgagattttcccggtaaagcgctgctcgatagcattctccacctgccgctggtactgccaccggtggtggtagggtatctcttgctgatcgcgatggggcgacgcggttttatcggcagctggctgtatgactggtttggtctgagcttcgcgtttagctggcgcggcgcggtactggcggcggcggtgatgtcctttccactgatggtgcgggccattcgcctcgcgctggaaggggtggacattaagctcgagcaggcggcgcgtaccctcggcgctggccgctggcgggtgtttttcactattacgttaccgttgacgctacccggcattatcgttggcaccgtgctggctttcgcccgctcgctgggcgagttcggcgccaccatcacgtttgtttccaatattcccggcgaaacgcgcaccatcccttcggccatgtataccctgatccagacccccgggggagaaggcgcggccgcgcgtttatgcttgatttcgattgcgctggcgctggtatcgctgctgatttccgaatggctggcccgcctcagccgtcagcggatggggaaataaacatgcttgagctcgattttacccagacgctgggtacccactgtctgcaaatttgcgagacgcttcccgccagcggcattacggcagtgttcggcgtctccggcgcgggtaaaacctcgctgattaacgccattagcggcctgacgcgcccgcagcaggggcgcatcgtcctcaacggcagagtgctgaacgacgttgataaaggtatctgcctggcgccggaaaagcgccgcattggctacgtttttcaggacgcgcgcctgtttccgcactataaagtgcgcggcaatctgcaatatggcatggctaagtctatggcggcgcagtttgacaagctggtggcgctgctcggcattgcgccgctgcttgaccgcctgccgggcggcctctccggtggggagaagcagcgggtggcgattggccgggcgctgcttaccgcgccggagctgctgctgctggatgagccgctggcatcgctggatattccgcgcaagcgcgagctgttgccctatctgcagcgtctggcgcgtgaaatcaagatcccgatgctgtacgtcagccactctctggacgaaatccagcatctggcggataacgtgctggtgctggaagaggggaaagtgaaagcctttggctgtttggaagaggtgtggagcagcagcgtgatgcacccctggcttccccaggagcagcaaagcacgatcctgaacgtgaccgttgccgctcagcatccgcagtatgccatgaccgcgctggcgctgggggatcggcagatatgggttaaccgtcttgacaggccgcagggcgaaagcgcgcggatccgcattcaggcctcggacgtttctctggtactgcagcccgctcagcaaaccagtatccgcaatattttacccgcgcaggtcatgcagtgtattgaaagtcatgggcaggttgaggtcaggctggagataagcggccgtaccctttgggcgcgcatcagcccctgggcgcgcgatgagctgggggtgaccccgggccagcggctgtatgcgcagataaaaagcgtgtcgatagccgcctgattacagcaggtggcgatagatgtagtcggcgatgctggtggtttcgttttcaccgatcaccacgttggcgcgcgctttgacctcctccaccgcgttgcccatcgccacgccggtaccggcggcttccagcatgctgaggtcgttatagttgtcgccgaaggcgataacatcctgcatcgacaggccctgcgacgcgacccactgcgccaggcgtttgcctttgctgttgccttcccgggcaatgtccacctgatcgtgccacgaccattcgcactccagacccagcgtctggccaacgtgttgggcaaagcgctgcagtttggcggtatcttcatcggtcagggcgaatttccacacggcgttaacttcgcgggccgcctgcgccagagaatcgacctgagtgaataccggacgctgctcgacgggcagcgactgcgcccagctggcggtgcggataacgtgcccggtcggctgctcgtacagcatggcgtcatcgacgtacatcaggccgtgaatatcatgctcgttcagcatttccgtcaggctcagggctttatctaccggcatcgggtcggattcaagcaccttttttgcatgataatcatacaaataagtgccattgcagcaaattgcaggtgtatccagcgccagcgcctgataaaaaggatggatagcgacgtgatgtcggccggtgacgacgatgatctgatatcccgcgtctttggcgcgagccagcgcatcgagcgaggcggggaggatggtctttttgccggttaagagcgtgccgtctaaatcgagggcaatcacgcgtgaggtcatgggttgtttccggttaatgatgaaaagttagcaggctatgatggtacaccgctgtgccattccggcaaacttttcagcatctaccgctaaagagccgatacacttgatctttcaggctaccaggaggcaacctgaagagcgttgtgtatgcatattgtgtttttcagggtgtcgttagtctgaaaaatgaaatttccacgtgcagtgaggaaggagtattcatgaaacaaaccgtttataccgccagcccggaaagccagcagattcacgtctgggatctggatcttgaggggaaactgaccctggtgcaggttgttgatgccccgggccaggtgcagccgatggtggtgagcccgaacaaagagtttctctacgtcggcgtgcgtccggagtttcgcgtactggcctaccgcattgcgcccgataatggcgccctgactttcgccggtgaagccgcgctgccgggtagcccaacgcatatttctaccgatcgtcaggggcgctttgtgttcagcgcttcctataacgcgggctgcgtgagcgttacgccgctggtggacggcctgccgcgagaagcggtggcggtggttgaaggtctggaaggctgccactcggcaaatatctctccggataatcgcaccctgtgggtaccggcgctgaagcaggatcgtatctgcctgtttaccctgagcgacgacggtttcctcgcagagcaggagccggctgaagtgaccaccgttgaaggcgcgggcccgcgtcacatggtgttccatccgaatcagcaatacggctactgcgtcaacgaactgaacagctccgttgacgtctgggagctgaaagatccgtacggaaaaatcgaatgcgtgcagacgctggacatgatgccgcctgattttgccggcgtgcgctgggcggcggatatccatctgaccccggatggccgtcatctctacgcctgcgatcgtaccgccagcattatcactatcttcagcgtctcggaagacggcagcgtgctgtccatcgaaggctatcagaataccgagacccagccgcgcggctttaacctcgatcatagcggcaaatatctgatcgccgccggtcagaaatcgcatcatatcgcggtgtatgaaatcaaaggcgagcagggactgctccaggaaaaagggcgctatgccgtaggccagggcccgatgtgggtcgtggtcaacgctcgctaagttctctgtcagtgacgaaacctcgccgcggcgaggtttttttacgcctgcgcaggggctacttcacccgcatacgatactcaatcatgccgcttttctccgcgacccagttatacagacgctggccccgaaggttggtctcatgcgtgtgccagtacaggctggctgcgtgacgtttgcgcgcctgcagctgaacatactcaatcagctgtttgccgatatgctgaccgcgaacggccgggtcaacgaagaggtcctccagatagcagtagtcgctttcggcccaggtggagcggtggaagagataatgtacgaaacccactatcctgccttcctgttttgccactgcgcagaacatcggttcggcgggatggaaaaagcgcttccaggtgagctgcgtgatggtttccgggatgtcgacgcgataaaacgtctggtagcttttccacagcggcagccactgggcaaagtcgctttcagccgcggggtggagggttacctgcgcgaggttaacgtcggttttgttgctattcatggctgttccttatttttatcaaccggatggtttgacctggcgctatggtaggtgctgttctggttcctaaaaagtgacactttctgtatatttataggatccacttttatgccgtcgatgcccgctgccgctcatgccaaaacccattgcccctctgtttcaggaactgttattagcccgcggcgtgattaaagatcaggtctaccacgccctgcgtcaggcgattctggatggccgattgtcggcgggttcaaaaatcccctccagccgggcgttggctgagatgatggcgatctcgcgaaactcggttattgccggttttgaccgcctgatggatgaggggtacctggtcacgcgcaagggggcgggcacctttgtctgcgagcatatcccggataacctcattagcgagtatgacgcgtcgacgccgcccgaaacggcaatagccgccgcagggccgcttaatcctgaggtcgccgcactggtgtcatcatggtcagaaagagaggacagcggcgaaatgcgtcaggtttttgccgtcggtatcggctgtaccgatctcttccctcatgctttatgggggcggctgctggggcgcgtctggcggcaatcgcgtcgtgagctgggagcgcacgccacgccctatggatatcaacctctacgccaggcgattagtcgctatattcaggcgacgcgcggcgtcaattgccacgaagatcgggtgatcattgtcaacggtattcagcaagcgctttccatcaccgctcaggctttactggaaaagggcgatgaggtctggctcgacgatcccggatacaacggcgcccgcggcgcattcgccgccaggggagcggtggtccggcccgttcgggttgacgaggagggcatggatattcaggatggcattcgccattacccgcaagctaagctggtctataccgcgccgtcgcaccagttcccgctcagtggaacgcttagcctgcccagaaggctcgccttactggaatgggcggaagcccatcgggcgtggatatttgaagacgattacaatagcgaattccgctatgccgcccgctctctgcaggcgttgcaggggttagataatcatcagcgggtcatctacgcgggcacattttctaagatgatgtatccggagttccggctgggctttttagtggtccccgagcatttgcgtgaacagtttgccatgacgaaatattacaccgatctctgtagtggatatctcgaacaggccgtcctggcccgtttcatcagcgaggggcactatgccagccacgtccgtcgtattcgcaaagcctgttttgagcgaaaaagcgcgctggaggcggcgattgcacgctactttgccgggcgcatggtcgtacatccaacggattcgggtattcacatagtctgctggctatcagcgggtttaaaggcagaagaggtcgtcgctaaggcgcgccagcaaggtttcggcgtgcagacgtttgagcgctattgtcagcggccgatgtcgcgcgaaggagttttattcggttttgcaaaccataccccagcggtgttgaccgagggaattcgccgcctggctgcgatgttttagctcagcaatacgggaaatattttgcaggggattaatggcattcattgccgggttatattgcagacaaagattatctttttggaaaacctgccccgtcctgattattcatctgacaataggggcagcgttttaaaaagagagataccgcgcctggatttaaagtatatccacggcttctgtaataatataaccattcgcttagcgatatgtgacttccctgtttaattacagccggttaataaatcagatatcatccatggtgtagctgacgacgatttccagggttttgcggataacgtctgcagttacgacatcgctggtggtttccagcgccgtaattaaccacaaaataatcgccttgttgctgagatgaccctcagactcaaggatgctgctgatagccagcgacatcaccgctgattcatcgatcagtctgtcgcctgcgttgcggaaatattcagagagtgcggtatcgttcaggcctgcgtaaatatccggttgctgatgcatagtctgtctcatcatattctctactttgtaagttaaacattagaccagtagtggtcagtgtattttattcgtacctggctgctgaggggaacctaataacgaattcggctcatcccaattatgcttagcgcctgaagtatccacggtattgttttttccacggcgagctaccatattactgatttcatcgataatacgcccaattgcattccgccgctttttatcctgttccccagcctgcatggcctggagtttcccgatcagtgcttgtttactaataggccccttatttttgagtagagagaggacagcctctccaatcaataaatcggttagtggatcataatcattgcgattcataacggtatctctgatcattgtcatctccttgactgggaatttagtagcaagccggtaatccgtgtcagatactggcccatcccttatatttcctcattcagtaacgacttaaatcaccagatagctgaagccacttttatcactgatgctcaaacaagagaccaatcaacgtttgataatggttttcttcttcaggttctgaagccacttcaaggcgacccagcagtttcgtacacagggatttgcgattcaggttgcgtccttcattaaggatatccattacaatctgccctaacgtctcctgctgcgaaggtaacgacgctttattgaagtagtgggcaatagcgttagccgtgtcaggaatgtaaccgttctgctgcatatgtgctcctgtcagttcaattatcagtgaagttgcgattaaagttatacaatgtttatcaacttgtacatagaaaatggaaaaaatatgttaattttcttaatgtttttcgtaacatattgatttgtatggttttaaaattgtacaaatcttaaggtaaacatcgagtggagatgtacgagttgtacaggtatgcaggaaggcaagaacgccagcgaaaagagggtgttaatgtgatttatttgttaatgactcgggctcttttacaggacttatgcgggtagacctgctactgtaatatcttattggctttcatctcttctgtcggaaacttcatgctcactaccatcatttatcgcagccatatctgcgacaacgtgtcaattaaatcgctcgaaagcatggttgctgaagcaaatgtcaagaatagtcaggaaaacgtgtcgggtattctgctttttaacggcacccacttttttcagctattagaaggacctgaagagaaggtcgaggaaatttaccgccgtatctgcgcagacccgcggcaccataacctcgtggagctgctcagggatcatggaccgatgcggcgctttggtaaaattggcatggaactctttgatttacgagagtttgaccgcgatgaagtgctgcaggctgtgctggataaagggaccacaaaatatcagctcacctatgacgacagagcgctccattttttccgtaccttcgtcgaagccacggaaaaggaaaactattacgaaattcctgcggctgaaagctgggagtttgtgatagaagacgctgcctgctaccctgaaactccgctgcaagaggccgaatgcagctttgcttttcagccggtcatcgatccgtttgccaaagaggtcgtctcctacgaagcgctgctgcgcacgacttccggtgattcgccagcggtctattttgacggactttcgcgagaggaaatctactggacggatctccacagcaagcgcattgccttcgccatggcgggacttttgcacctccgtggacgcacgttgtcgattaatctgctgcccatgacgctggtgaatgttcccaacgctgtcgaatttctgttagcggaaattgaagccagcggtttgatccctgagcaaattattgtggaatttaccgaaagcgaagccatttcccgtcttgatgaattcaccgattccgtgcgtaagctcaagtctgcgggaattcgcgtggctatcgatcattttggcgccgggtttgccgggctattgctgctggctcagtttcagccggaccgcatcaagattaatcgccagctggttaaagatatccataagcacggcccaaaacaggcaatcgttcaggcgattattaaatgctgtcactccctggaaatcgccatttctgcggtaggtatcgagcaggcggaggagtggatgtggctggagtcagcggggattacgcatttccagggaaatttatttgccagtccgtgtctgggaggcattccgccggtagcatggccagagaaaaaagtagcgtgtgagcttctttaaattttgaccccggctcagcgcagcgtgtcggttaaaaagcggtgtataacggtaaaataagccctgttttttgcccggtatatcggcgcccgacctgtttattttagctgtacaagaaaagttaattgtacaaccaggctaaattcgttaatttagtcggtaaagtattatcaggttagagggcgctaatggcatattacagcatcggtgaggttgccgaacgttgcggaatcaaccccgtgactttgcgtgcatggcagcgaagatatggtttgctaaagccgcagagaagcgagggaggccaccgccagtttgacgaggaggacgttcagcgcattgaggaaatcaaacgctggatcgatcgcggggtctccgtgggcaaggttaaggcgcttctggaaggccatcaacctgaaacgcaagacgctgccgtcctgctccaggaagagatgatgacgcttctgcgaggtgtccagccctcaaaattacgcacccgcatcatgtccctcagccatgaatatcccgtagataaactgattgaccggctctttgtccccgtccgcagtaagctcaatctcgatccgaatacctccatggcgattatcagtatgctggacggtatcctgattgattgcgtagcgtccattcttgcggaatcgcgcaaaaaggtggggaaagagacgctgttggtggggtggggtaatgaagaccgtacccgtctgtggctggaagcgtggcgtttatcgcagcgcgcctggcacgtcaacgtgctggcggagccgctggattctcctcgcccggaactgtttcctggtcagcacatttttgtctggaccggccgcgcgctgacccccttgcaggcagaattacttagccactggcaaagccagggcttcaccattgagtttcacggagagtaagcgtcttagagggttagcagcggaacatttttagagatgttattccgccgcttgtcttcctgaagcatggcaacatgcgctggcaggtaaattatcagaaattgagctgggtccaggctttaaacgtttcgctgcggctaatattaaaaaaatctgtccgacccgagcagccgagctttttgattaaggtcaggcgaatttgataaattgttttaatatgtaaattcagcgacttccctatatttgccatcgcttcaccatcgttcatcaggcgaatcacttctttttcgcgattggtaaaaacgatactttcagattcccggtccggcttcttaccgaacaaggtggggcggagaataaacgattttatctcagcgggcgttgagcgcgccgggattctgtacattggtatttcgctcaggaagttcaaatcattaccgtcggtgagcaggacaaaacgaactcttttgcgatcgtaatgatgattaagcaccgcataatagttatcgctggtgaaaaacacatattttccatgaaaacagcctggtgataatgaatcgagtacaagctgtaatccttgacgaagaaggttattgttaatccaaagatcgtaatgattaaaaaagtgaccttgcttgtcgttattcatttgtcctccgaggtagaaatgttaataatggcttaatttaacaaatcacatatcatgcttagtgatggtttttaccacgtagcacatgcagcgtttggatatataaatcggcgagtatttcatttttctcgagattcaggcgccgctgaacctcaacgattaaacgctcatggctaacggcttcgctctccgtctgggtctgcaccatgtgttcgatatttttcagcaaagcagagttagaaataaactctgcaggaatagtatttttaatctgcatggtatatctcgggttatgttagacaataaatcaacaaacaaagatgcgggataaaaatcatctttgctctacggttctttaccatttcaaaggaaatggtgtgcattttttaaaatcataagaatgctgtaatgcagaatttaaaacttacgtaataactatagtcacgatcttcaggatgtacaatttttccgaattaattttgtacatttagttggtttttttaacattggcttataacatattgttttgtatagttattttttgtaaagataatgtgaaaaagttgtacaggacggcgtctgtacagggataacctacaggatgaggggatagcggtgaagaagcgggaagggcacagcgggaagagaaagagacaaagggggaatagcttcccccttttggcgtaagcgttactgcttcggttcagcgacgacaaagcttcccacgccgcggttgttgtattcccacatgcggttgaagttagcgtcattcaggttacgctgcgggttgcctttggcatccgcagtaccggtgttgccgctaaacggacggtttgaaccgacggcatcagcccacggtttggcaatattaaagccttcattaatgacgctatcgcgaataacgacctggccattggtgttgccgtcaacgtccagagagcggcccagctgcgcgacgttatcgccggaagcggtaaagcggctgttgatcgccaggaagccgtaggtcacgctcttcagggtcgctggcgcaaagacgtagccctctttctgggtgcgcgaattgaccacacggaagtcggtattatcgaacacgaccgccccacgaccggaaacgatatcgacgtcgccttcaatatagctgttgctgaccagggttcgggtctgacggttatcctgcaggcggttttgtacgccgctgttggtcacgaaaaaggtgttctggcgaccgaggatattcaccttgttaatctgtacccgatcgccatcgctacgcagcgccacggcctgatgggtgcccgcgtctacgctgtcgccgaggttgttggcgatagtcaggttctgtagctggagatcgttattctgcgaccagaataccgctgagcacatcacgccaacggtggcggcacgtctgctctggcagctgtcgtacatataccaggccggtttgcccggcatatatttgccgcccggattaacctggtgacgccaggagaccggatccatttctgaatcaatcgctgcgctgatttttacatcaatcggcttctcaccggtgccgtacagggtcagcgcgccaggcgccgccggaacgtatacggtgcccgcatattcacccggcatgatggcgataaactgacgacgattggagtggcgggtaatcgctgcatccaccgcggcctgaatcgtggtgtgggttaccccctgggtacccgcaggacccacgacaaaatccggctgcgccgggaggctgatggcggacgggctccacgcagcggcgttaggatcgagagactggaaatagctcgctggtaagaagtttttcgcctcatcggcggttaaaactggacgagaggccgtgcccggcgctgtttgcgttgagggctgttgatcggcaggcgtcgaactacaggcggacaacgtcacgccaaaggccagcgccagcgccaggcgggaaacggaatatgtgttcatgttgctccgggcaagaataaattaagggtataggtcctttaaagcctgctgttttataccaacttaagcgaaacgggaagacgtagcgcaaaaaagttgcttctttacataataagagccgggaaggggccgcttttgatcacaaataaataacatttgccgggggctgagttgacatttctcgcagaatcaaaataaatgtctatacaacccatgacaagttgaccgctatgacacacacaccttccgaacgcctaatctggcgaaacgtccgcctggccacgctcgatccgcgtttctctcagccgtatggactcgtggagcatcatgcgctgctggtgcgcgatggacgcattgaagccattgtgcccgaaagcgaggcgcccgcagggcaaagtattgacctcggcggcaggctgctcacgccggggctgattgattgccacacgcacctggtcttcggcggcagccgggcgcaggagtgggagcagcgcctcaacggcgtctcctaccagaccattagcgccaacggcggcggcattaacgcgaccgtgcgcgccacccgggaaagcagcgaaacggagctgctggcgctggcccggcagcggctggctcgtctgctgcgcgaaggggtcaccaccctggagatcaagtccggctacgggctggatctcgcaaacgaacgtaaaatgctgcgggttgtacaacagcttgccgcaacgcataccgttgagatttcccccacgctactctccgcccacgccacgccgccggaatataaaggcgacccggacggctatatcaatctggtatgcgaaaccattctgcccacgctgtgggaagaggggctatttgaaagcgtcgatgccttctgcgaaaacgtcggctttacccccgcgcaaactgaacgggtttacagcacggcccaggcattaggtatcccggtaaaaggtcacgttgagcagctctcttcgctgggcggcgccgaattagtgagccgctataaaggcctgtccgccgaccatattgaatacctgaccccagagggcgtggcggcgatgagccgcagcggcaccgtggcggtgctcctgcccggcgcgttctatttccttaacgaaacccgcaggccgccggttgaactgctgcgcgaatatcaggttccgatggcggtggcgacggactacaaccccggcaccagccccttcgccagcctgcatctggcgatgaatatggcctgcgtgaaatttggcttaacgccggaggaggcgtgggcaggcgtaacccgtcatgcggctcaggcgctgggccgccaggcgagccacggtcagctggcgccgggcttcgttgctgattttgctatctgggacgcggagcatccggttgagatggtttacgagccggggcgcagcccgctctggcagcgcgtggtgcgaggagaaatcgcatgaagctatgacaaccgacggccgccgggatttggcagggacgcgaccacagcgcggaggcgcggcaaatcgcccattggtggcagtagcgattcagtatattctggacgtttcgccgcccattcgcacaaggaagcccggccatgttctcatcgcaacctcgttccgcgcctgcgcctttctatgaaaaggtgaaacaggctattagcgaaaagatccacagcggcgtctggcgtccacacgatcgcattccttcggaggcggagctggtggcgcagtttggctttagccggatgaccatcaatcgggcgctgcgcgagctgaccgatgaaggccggctggtgcgattacagggggtggggacgtttgttgcggagccgaaagggcagtcggcgctgtttgaagtgcgcagcatcgcggaggaaattacctctcgtcatcatcagcaccgctgcgaggtggtgctgctggaggaaacgcaggcggatctgattcaggccgcggcgctcaatgtggccgccggtacgcggattttccattcgctgatggtgcattttgaaaatgaggtaccggtacagattgaggaccgctgcgtcaacgccgccgtggtgccggactatctgcgtcaggactataccgcgaccacgccccacgactatctgtcgctgatcgcccctctgaccgaaggggagcacattgttgaggcggtgcaggcaacggcggaggagtgcgcgctgctgcatattcacgcgcacgacccgtgtctgctgatccgccgccgcacctggtccaccacccatatcgtttcccacgcgcgcctgattttccccggcagccgctaccgtctgcagggccattttggttcctgatcttcctgcgcgtcggcaaaacgtgattgctgacgcaatataacaaaaatgtatcttttgtgttaaatcctggcttgcgtatgcttgtatagacaagtatatgtatctacgtacacaacgttaattgtcaggagaaccccccgatgtcgcaaagcaaataccgccagcaggacgtacgtgcaccgcgtggcacaacgttaaatgcgaagagctggctgaccgaagctccgctgcgtatgctcatgaataacctcgacccggatgtcgccgaaaacccgcatgagctggtggtgtatggcggcatcggacgcgcggcgcgcaactgggaatgctatgacgctatcgtgaaggcgctgaaaaacctcgagagcgacgaaacgctgctggtgcagtccggtaagccggtgggcgtattcaaaacccatgaaaactcgccgcgggtgctgatcgccaactccaacctggtgccgcactgggcaacctgggaacactttaacgagctggatgccaaagggctggcgatgtacggccagatgaccgccggcagctggatctatattggcaggcagggcatcgtgcagggcacctatgaaaccttcgttgaggcaggccgccagcactaccagggcagcctgaaggggcgctgggtgttgaccgccggtctgggcggcatgggcggcgcgcagccgctggccgcgaccttagcgggcgcctgctcgttgaatatcgaatgccagcagagccgcatcgatttccgcctgcgtacccgctacgttgatgaacaggcgacgtcgctggatgacgcgctggcgcgcatcaaaaaatacaccgccgaaggccgggcaatctctatcgcactgtgcggcaacgcggcagagatcgtaccggaaatggtcaaacgcggcgtgcgcccggatatggtgaccgatcagaccagcgcccacgatccgctgcacggctatctgccgaaaggctggaactgggaagagtaccaggctaaggccgagtcggacccgcagggcactatcctggcggcgaaacgcgcaatggccgaccacgtgcaggcgatgctggcattccacgaaatgggcgtgccgacgtttgactacggcaacaacattcgccagatggcccaggagatgggcgttggcaacgcgtttgctttccctggcttcgttcccgcctatatccgcccgctattctgccgcggcatcggcccgttccgctgggttgccctgtccggcgacccgcaggacatctataaaaccgacgcgaaagtgaaagagatcgttaaagacgataagcacctgcatcactggctggatatggcccgcgagcgtatcagtttccaggggctaccggcacgtatctgctgggtaggcctcgaatggcggcagaagctggggctggcgtttaacgaaatggtgcgcagcggcgaagtctccgcaccgatcgtcattggccgcgaccatctggactccggctccgtcgccagcccgaaccgcgagacggaagcgatgcgcgatggttccgacgccgtctccgactggccgctgctcaacgccttactgaataccgccagcggggcgacctgggtgtcgctgcatcacggcggcggcgtcgggatgggcttttcgcagcactccggcatggttatcgtctgcgacggtaccgatgaagcggcggtgcgcattgcccgcgtcctgcacaacgacccggcgaccggcgtgatgcgtcatgccgacgcgggctacgatatcgcgattgagtgcgcgacagaacaaggtttgaatcttccgatggtggcagcaacgcaggggcacgctaaatgaacgctttaacactgattccgggtcaactcagcctgtcgcagctgcgcgacgtctacagccagccgctgaacattacgctagacgaaagcgcgttcgcggcgattgatgacagcgttgcctgcgtcaacgcgattctggcggaaggccgcaccgcctacggtatcaacaccggttttggcctgctggcgcagacgcgcatctcaaccgaagatctggaaaaccttcagcgatcgctggtgctgtcgcacgcggcggggattggcgaaccgctggatgatgacctcgcgcgtctgattatggtgctgaaaattaacagcctgtcgcgcggcttttccggcattcgcctgagcgtgattcaggcgctgattggcctggtcaacgcgggcgtgacgccgtggatcccggcgaagggatcggtcggcgcctccggcgacctcgcgccgctggcgcatatgtctttgaccctgcttggcgaagggaaagcgcgcgtgcgcggcggggagtggctgccggcgacggaagcgctgcgtcaggcggggcttgagccgattactctggcggcgaaagaggggctggcgctgctcaacggcacgcaggcgtcgacggcgtttgccctgcgcggcctgttcgaagccgaagacctgttcgcttccgcggtagtttgcgggtcgttaaccaccgaagcggcgctcggttcgcgtcgtccgtttgatccgcgcattcacgaagcgcgcggtcagcgcgggcagattgacgccgcggcgcactatcgccatctgctgaccgacgacagcgcgatttcccagtcgcaccataactgcaccaaggtgcaggatccgtactctctgcgctgccagccgcaggtgatgggtgcctgcctgacccagcttcgccaggcggcggaagtgctgctggttgaagccaacgcggtatccgataacccgctggtgttcgccagcgagaacgacgtgatttccggaggtaacttccacgccgaaccggtggcgatggcggcggataatatcgcgctggcgattgccgaaatcggatcgctgtcggagcgccgtatcgcgctgatgatggacagccatatgtcgcagctgccccctttcctggtcaaaaacggcggcgtcaactccgggtttatgattgcccaggtgacggcggcggcgctggccagcgagaacaaagcgctgtcgcacccgcacagcgtggacagtctgccaacctccgctaaccaggaagaccacgtctcgatggccccggccgccggccgccgcctgtgggcgatggcggaaaatacccgcggcgtactggccgttgagtggctggccgccgtgcagggtctggatatgcgcgaaggcctgagcagcagcccgctgctggaagaggcgcgccacctgctgcgcgaacgggtgacccattacaccgaggaccgcttcttcgccccggacatcgaaaacgccattgcgctcctggcggcgcgtcatctgacgcggctgctgcctgccgtgctctgagaccaacgctaaaccatcgctgttctctgtacctgcgccgggaggatctcttcctcccggccaccctacacgcatatttgtcgtcgtataaaaactatcaggacacttgcatatgcaacaacaaaacaagccacacctgctgcgcgggctgaatgcccggcacattcgttttatcgccctcggctccgccatcggtaccgggctgttctacggctcggcatcggcgatcaaggccgcgggcccggcggtactgctggcctatctgatcggcggcgcggcggtgtttatcgtgatgcgggcgctgggggaaatggcggtacgcaaccccgtttccggctccttcagcagctacgcgcgccagtatcttggcccgctggcgggttttattaccggctggacctacacctttgagatggtgatcgtcgccctcgcggacgttaccgcgttcggcatctatatggggctgtggtatcccgatgttccccgctggatctgggtgctgagcattatcttttttatcggcgccatgaacctgtgcagcgtgcgcgttttcggcgagatggagttctggctgtcgctgatcaaagtagtggcgattattgccatgattgtggcgggcggcagcatcattttctttggattcggtaacgcctttccggcaaccgggctggagaatttgtggagccacggcggctttgcccctaacggctgggaggggattatagcctcgctcggtatcgtgatgtttgcctttggcggcgtcgagattatcggcgtgaccgcggcggaagcgaagaatccgcagaaggtgatcccgcaggcgatcaatactatcccgctgcgaatcgtgctgttctatgtctgcaccctggcgattctgatggcgattttcccgtggaacagcttcggcgagcggggcagtccgttcgtgctgatttttgatggtctggggattccggcggcggctaccatcctgaatatcatcgtgatcagcgccagtatttcggcgattaacagcgatatttttggcgcggggcgcatgatgtacggcatggcgaaagaggggctggcgccgaagagcttccagcgcatcgccagcaacggggtgccgtggatgacggtggtggtgatgggcgtggcgctgctggcggcggtggtgctgaactacctgatgccggagcaggtgtttgtgctgattgcctcgctggcagcttttgctacggtgtgggtctggctgatgatcctgctggcccactttgcgatgcgtcgcggcctgtccgctgaagagcgcggcaatatcgcgttcccggtgccgttctggccggtggcgccgctgctgacgctgctgtttatgggactggtcatcgcggtgctggggatggtggaggagacgcggattgcgcttatcgccggtctggtatggctcgggctgctgacggcggtgtggtttgcgcgggtgcgcaaaaacgccgtgcaggcggtgacggagtcgtgattgttttggtttacccgggttgcggctgacgccttacccgggctacccaatcgcactcacctgtagcccggataaggcgtttacgccgccatccggggcttagctaaacagggcggtaatcgacgcgctgccgaggctgtggaaatggacgttaaagccgaccatcgcgccgctcgcgccctcatcgaccgcaattttttcgacgtccagcgcgtggacggtaaagatatagcgatgggtctcgccttttggcggcgccgcgccgccgtatccggcctggccaaaatcggtacgggtctgaatcgcctcttcgggcagttccgcctgtccggagccggctccctgcggtaacacgcgggtatcggccggaagattggccaccagccagtgccaccagccggagccggttggcgcatcgggatcgaagcaggtcaccacaaagcttttggttccggccggcacatcgtcccacgccagatgcggcgagatattatcgccatcgtagcccatgccgttaaagacatgacgattgggcagcttctcaccatcctgtaaatcatgactgattaatttcatcgtctctcctcgtagtcatccgctgattagccagaaagtgtagcgcgagagaggcgccattaccgtcgcttattcgctaaaaaatgtttcttcctgaaccgcggcgtttaccgcccgcgtcaggcggctcagctgctccggcgtaatgatgtacggcggcatcaggtaaatcaggcgaccgaacgggcggatccacacgccttgttcgacgaaaaagcgctgcagggcggccatattcaccggccgatgcgtctcgatcacgccaatcgctcccagcacccgcacatcggcaacctgcgcggattcgcgcgccggcgccagctcggcgctgagctgcgcttcaatggctgccacctgctgctgccattcgccgctttccagcaggcgcaggctctcggtcgccgccgcgcaggccagcgggttgcccataaaggtcgggccgtgcataaagcagccggcttccccgtcgctgatagtttccgccacctgacgggtggtgagggtggcggagagggtcatggtgccgccggtcagcgctttgccgaggcacagaatatccgccgcaatccccgcgtgctcgcaggcgaacagcttaccggttcgaccaaagccggtggcaatctcatcggcgatcagcaggataccctcgcgatcgcacatcctgcggatccgcctgagccactcggggtggtacatccgcattccgcccgcgccctgaacaatcggctcgaggatcaccgcggcgatttcatggcggtgggcggccatcagacgggcgaacggcaccatatcccgctcatcccagtcgccgtcgaagcggctctgcggcgccggggcgaagaggttatccggcaaatagccctgccacaggctgtgcattgagttcgtcggatcgcagaccgacatcgcgccgaaggtatcgccgtgatagccgttgcggaaggtgagaaagcgctggcgcgggtctcccttcgcctgccagtactgcagcgccattttcatcgccacttcgacggcgacggagccggaatcggcgaggaacacgcattcgaggctttccggggtcatcgccaccagctggcggcacagggcgaccgcggaagggtgggtaatcccaccgaacatgacgtgcgacatctggtcaatctgcgctttcatcgccgcgttcaggcgcgggtgattgtagccatgaatggccgcccaccaggacgacatgccgtcaaccagctgcccgccgtcggcgagggtcagctcacagccgtgggcggccacgaccggatagaccggcagcggcgaagtcattgaagtgtaagggtgccagatgtggcgccgatcgaaagcgaggtcgtccgttgtcataatcgacttgtaaaccattttgaaaacatttaggtttacgagtataaaccgaaccaacaattaacaaaaccctttggagaggctaatggctcaccacccccgctggacaatgtcgcaagttactgagttatttaataaaccctttctggatctgctgtttgaagcgcaacagatccatcgccagcacttcgacccgcgccaggttcaggtcagcacgctgctgtcgattaagaccggcgcctgcccggaagactgcaaatactgcccgcaaagcgcgcgctataaaaccggtctggaatccgaacgcctgatggaggttgaacaggtgcttgagtcggcgcgacaggcgaaacaagccggttcaacccgcttctgtatgggggcggcgtggaagaatccgaacgatcgcgatatgccgtatcttgagcagatggtgaaaggggtgaaagcgctagggctggaagcgtgcatgacccttggcacgctcaacgatagccaggcccagcgtctggccggcgccggtctggattactacaaccacaacctcgatacctcgccggaattctacggcaatatcatcaccacccgcacctatcaggagcgcctcgataccctcgataaagtgcgcgatgccggaattaaagtgtgctccggcggtattgtcgggctgggggaaacggtcaaagaccgcgccgggctgctgctacagctggccaatctgccgacgccgccggaaagcgtgccgattaacatgctggtgaaggtcaaaggcacgccgctggcggataacgacgacgtggacgcctttgattttattcgtactatcgccatcgcgcgcatcatgatgccgacctcgcacgtgcgcctctccgccggtcgtgaacagatgaacgaacagacccaggcgatgtgctttatggccggggcgaactcgattttctacggctgcaagctgctgaccacgccaaacccggaagaggacaaagacctgcagctgttccgcaagctggggattaatccgcagcagaccgaggtacttgaaggcgataacgcccagcagcagcggctggagcaggcgttgatgaacccggataccgaggaatattacaacgcggcggcgctatgagctggcagcaccgcatcgagctggcgctggcggaacggcaggcggcggatgccttgcgcagtcgcctgccggtgacgctgggcgcaggacgctggctcagccgcgaagggcggcgctggctcaatttttccagcaacgattatcttggcctcagccagcatccggctatcgtcaaggcctggcagcagggggcggatcgctacggcgtcggcagcggcggctccggccacgtcagcggctatagcgaggcgcaccgcgcgctggaggagcagctggccggctggctgggctatccgcgcgcgctgctgtttatttccggctttgccgcgaatcaggcggtgattgccgcgctggcgggcaaagaggatcggattgtcgccgaccgtctcagccacgcttcgctgctggaagccgccagcctaagcccggcgcagctgcggcgttttcagcacaacgacagccgccatcttgacgatttgctggcgaaaccgctatccggccagcagctggtggtgaccgaaggcatttttagcatggacggcgatagcgcgccgctggctgaggtttatcaggcggcgcgggcggccggcgcgcttctgctggttgacgacgcgcacggtatcggcgcgctcggcgaagaggggcgcggcagctgctacgcgcagcaggtacgcccggatctgcttatcgtcaccttcggtaaagcgtttggcgtcagcggcgcggcggtgctgtgcagcgaggcgctggcggattatctgctgcagtttgcccgccatctgatttacagcaccgccatgccgccggcgcaggcggtggcgcttagcgccgcgctggccgtgattcgcagcgacgagggtcagcagcggcgggaaacgctggccggccatatcgccgactttcgccggggaatgtcccactatcccggggagctcactgattccggcagcgcgatccaaccgctgatcgtcggcgacaacgcccgcgcgctgcggttggcggcgcgtctgcgtgaggaaggctgctgggcgacggctattcgcccgccgacggttcccgtcggcagcgcgcggctgcgcctgacgctgaccgccgcgcacgagtctgccgatatcgcccgcctgctggaggtgctgcatgacggcggtgaataagcgcgccgtcgcggcggcgtttggccgcgcggcgggacattacgctcagcacgacgaattacagcgtcttagcgcctcgctgctgctggaacagctcgatatcaagacctttcctgaggtgctggacgcgggctgcggccccggcagcataagccgcttctggcgcgatgcagggagccgggtgacggcgctggatctttccgtcgacatgctggcggaggcccgccgcggaaactgcgcgcaccgctacgtcgagggcgacatcgaagcgctgccgctggcggacggctgcgttgatctggcgtggagcaaccttgcggttcagtggtgcgacaatctcgcgaccgccattgatgagctgtcccgggtcgtgcggcccggcggccgcgtggcgtttagtacgctgctgtcaggttcgttacctgagctcattcaggcctggcaagccatcgatgagcggccgcacgccaaccgttttctcagcgagcaggcggtgcgtcaggcgctggccgaacgccgcgccagcggccacgtccacgccatcacgctgccgtttcccgacgcgctcagcgcgatgcgctcgcttaaaggcattggcgcgacccatctgcaccacggacgcagccctgcgccgctcagccgcggcaagctgcggcagctccagctcgcctggccgcagcagcagggccagtgcccgctgacgtatcatctttttacaggagttatcgaacgtgactaaacgtttcttcgttaccggcaccgacaccgaggtggggaaaaccgtcgccagctgcgcgctgctgcaggcggccaatcgcaagggatttaaaagcgctggctacaaaccggtggcttccggcagcgactgtacggcccagggattacgtaatgaggatgcgctggctttacagcgcaatagccgcgtggcgctgtgctacgagcaggtcaatccgttcacctttgctgaaccgacgtcaccgcatattatcagcgccgatgaagggagaccgattgacgccgccgcgatttctgctggactgcgcgagctggaagcgctgtccgactggctactggtggaaggggcggggggctggtttacgccgctgtcagaaacgctgacctttgccgattgggtacaggaagagcggctgccggtgattttagtggtcggcgttaagctggggtgcatcaaccatgccatgctgaccgctcaggcggtgctacaggccggactgccgctggcgggctggatagccaacgatatccagccgcccgccaggcgccaccctgaatatctggcaacgctgaaacgcgtgctgcccgcgccgtttcttggcgagatcccgtggctggtggaggcggctcagcgcgaggatctcggtcagtatctcgacctcagcgcgctggatcgggcgtcatccacttcgccagcagcggggcatccagctggataacgtcgccctgagctacgctgcgtccacagtgcagcagacagaaacgatccgccacccgacgaataaacggcaggtgctgttcggcgatcagcaccgtcaggccaatatcgcggttcaggcgcatcagtaaatccccgagcttgtgcaggaagcgctggccgccgccgcgcgaaggttcgtcgaggatcagcaggcgcggacgggttatcagcgccctggccagcgccagctggtactgatcgtcggcgctcagggtaatccctttactttggcgcagagcgtacagctcggggaacagatcgtaaatctctccggcgaccgctgacgccggttcgccgcccgccgcaagggcaatgtgcaaattttcctccacgctcagctgcgaaaagatccgtttatcctgcggtacatagccaatgccgatggcgctgcgagactgcgcggagagcggcatcaggtcatagggcgccgatcctccgtcctgccaggtgatagtgccgctggccaccggtagatgaccggtaatacagttgacgagcgtggttttccccattccctggcgccccatgacgcaagtgcatttaccgggtttgagctcaaggtcaacattccacagcgtgtgctggcttccgtaatagtggttcacggcgcgtagactcaacatagacgttttctcctttcctgggatagcaggcgacgagaagattctgcaaatctcttgccaggaaaaagaactctcggtatttgctggtcaatacaggtgcgaccgggcacaagcggaccgaccttgcactttcccggtgcccgcgcgctgaaatgtggtgcaaaaaataacaaaaaatctagccactcttcgccaataaacagcaaaaaaaattcaattaatttttttcgcggcgggtttggccggggcgacgggttttgttcgggtggctcgggtcatgggctgcagacagttatccactattcctgtggataaccttgtgtattagagttagaaaacttgcggtaagctagagagtacgcggcctgcggccgaattggcgcgaaacccgtcttttattaaattctattaaatatcaattatttaaataaaatcaatgcctgtaagaaaagtgtcaccgactgccataaaacattcatcccctcgcttgacaaatgttaaatggccatactttttggggataaccctgaagcgtggtcgattatcccgtaaagcggtttttattcgtccatgttggcggtaaaaagcgctatttagtccgactacgataatacggcactgtttttatatccagtattttttattggcaaaagctgagccggcgagtagaattaaacacctgccgttcaacccttcttcaggttctgattgatgagtaaaccgttcaagctgcattctgctttccgtccctccggcgatcagccggaagccattcgtcgcctggaagaggggctggaagatggcctggcgcatcaaaccctgctcggggtcaccggctcaggtaaaacgtttaccatcgccaacgtcattgctgacctgcagcgtccgacgatggtgctggcgccaaacaaaaccctggcggcgcagctatacggcgaaatgaaagagttcttcccggagaacgcggtggagtatttcgtctcgtactacgactactaccagccggaagcctacgtgccaagctcggacaccttcatcgagaaagatgcgtcggtgaacgaacatattgaacagatgcgtctgtcggcgaccaaagcgctgctggagcgtcgcgacgtggtggtggtggcctcggtctccgctatctacggtctgggcgatccggatctgtatctgaaaatgatgctgcatctgacggtcggcatgattatcgaccagcgcgctattttgcgccgcctggccgagctgcagtatacccgcaacgatcaggccttccagcgcggtaccttccgcgtgcgcggcgaggtgattgatatcttcccggcggagtctgacgatatcgcgctgcgcgttgagctgttcgatgaggaagttgagcgcctgtcgctgttcgatccgctgaccggtcatattgagtcgacgatcccgcgcttcaccgtttatcccaaaacccactacgtcaccccgcgcgagcgtatcgtccaggcgatggaagagattaaagttgaactgtcggagcggcgtaagcgattgctggagaacaacaagctgctggaagagcagcgtctgagccagcgtacgcagttcgacctcgaaatgatgaacgagctgggctactgctcggggattgaaaactactcgcgctatctgtcgggccgcgggccgggcgaaccgccgccgacgctgtttgactacctgccggccgatggtctgctggtcatcgatgagtcccacgtcacgatcccgcagatcggcggtatgtaccgcggggaccgggcgcgcaaagagacgctggtggagtacggtttccgcctgccgtcggcgctcgataaccgtccgctcaagtttgaagagtttgaggccctggcgccgcaaaccatctatgtttcggcgacgccgggagcctatgagctggataaatccggcgacgaggtggtggaccaggtcgtccgtcctacggggctgctggatccggtcatcgaagtgcgtccggtaggcacccaggtcgacgatctgctctcggaaattcgcatccgcaccgcgatcaacgagcgcgtgctggtcacgacgctgaccaaacgcatggcggaagatttaaccgaatatctggaagagcacggcgagcgggtgcgctacctacactcggacatcgacaccgtggagcgcatggagattatccgcgacctgcgcctcggcgagtttgacgtgctggtggggatcaacctgctgcgtgaaggtttggatatgccggaagtttcgctggtggcgatcctggatgccgataaagaaggcttcctgcgctctgaacgctcgctgattcagaccattggccgcgcggcgcgaaatatcaacggcaaagcgattctctacggcgataaaattaccccgtcgatggcgaaagcgatcggggaaaccgagcgccgccgcgagaagcagcaggcgtacaacgaagagcacggtatcgttccgcagggtctgaataagaaagtggtcgatattctggccctcggtcagaatatcgcgaaaaccaaaaccaaggggcgcggcaagtctcgctcaccggttgaggcggatgtcgtcgcgctaacgccgaaggcgctccagcagaagattcacgagctggaagggcagatgatgcagcacgcgcagaacctggagttcgaagaggcggcgcaaattcgcgaccagcttcaccagctgcgcgagctgtttatcgccgcttcgtagcggcgttgccagctaaatatcgcccgggccttaccgggtcttcgggcgatggacggaatgtgtttttcgtaggccgggtaagacgccagccgccacccgacagaaaagcgggcacatgagccaaaacgaggtggccagaacgctttggttatttgttgcccctctgtcgcgattttccgtgatgcttaatgttggcttaatcttgtttggcgaaactatcctcactttactgaggatagcgccatgcaaaaattaaccttccgcgaatacctggcagtcacctgcgcgtttgttatcgtcgttgcctttttccatcagtgggtgctgacgttctgacgcgaagctttagggaagagtacccaggcgcgaacgccgggcccgggctgtcggttatgtaaaaagaactgcgcgtcgtgcagctgagcgatgcgggtgacgatgcttaacccgagaccaataccgccatagcggctgtccatgcggacgaacgctttgcttaactcaccgcttttagcctcatcaattcccggtccttcatcctcaacggccagaatgggcgttgggccaggcgctatcgacactttaatcgtcgaccccgtcgggctataacgatgcgcgttttcgaccaggttacgtaaaataacctgcaccagcgtagcgtcgcccgacacgattgcctctccatccttaacgttgatcgccagcgtctgctggcgctgctgcagcattgtctcaagctcgctctgcagcggttcgattacatcctctttcagcgcaacctgctgatagcttccggcggagaatgactggccaacgcgcgccagctgaagcagctgggtaatgctattggtcatttgatcgagacgctgaattagcgggtccacgctaacgccatgcactttcgccagaagctccaggtgcagacgcagtccggccagcggcgtgcgcagctcatgggcgacatcggcggtaaacagacgctcgcgatcgagggttaaattcaggcgggacaccagctgattaatcgcggtggtcaccgcggtgacttcaggaaccgattccttcagcgtgataggctgcaggttgtccggggtgcgactttccagctcgagctgcagtctggaaagcggctttgtgatttttttcaccgccagcagggagatatacagcgccaggccgataatcagcaggcttgggatcagcaggctggctaccgcttcgcgaacctcatgctctatatgcttctgattgttatgcccttcaatggcgctggcgaccagcagctgaatctgctcctgactttcatgccacagccagaacacgctgatgagctgacaaacggccagaatagcgccaattgtcagcagcagccgatgacgcatagtccagttttcactgacaaaaaaagccatagcgttattcggtctccgcgttatcaaccagcatatagccaaagccccggacggtgcggatgcgtgatttgccgactttatcgcgcagattatggatatgcacctccagcgtattggtggccggttcgttgtcccagctgtaaatgtcgttgtagagaatttcgcgatgcaccgggctgcccgctttcatcatcaggcgtgaaagcagagcgtactctttgggcgttaaatccagggactgctcgccgagccagaccagccgccgggtgacgttcaggcgcagattgccgacggacagttcgttatcgccctgattattgtgacgacgcagcagggcgcgaatgcgcgcgttcagctcttccagcgcaaacggcttaaccaggtagtcatccgcgccggtatccaggccgctgatgcggtcatcaacggtatcgcgggcggtgaggatcagcaccggctggctgaacttctcccgtcgcatgcgcgccaggaagtgcagaccgtcttcatccggcaggccgaggtcgagaaccaccaggctgtagtggttgctggccagagagagggcggcttcgtgggcggttgatacgccgtcgcaaacgtagccttcgctttgcatcgccagaattaacccttgtaacaggagcgcatcgtcttcaatgactaaaattttcatcggcctgcctctctacatggcgttaaaatatcgtctgttgcctggtactcgcgggtgctgaccccgagcagaccgagcagggtggagaaaagattatcctgcgaatacgcttgcgttttcgctttttgctgcaaacactggctggacacgccatagcgctgttgataatccgctgacagccacagcagcatcgggacgtgtttttgcgtctccggggcgatggaccacggtagcccgtgtaaatacaccccatcctcgccaagcgactcgccgtgatccgagagatacaccaggctggtggtaaatttatcctgctttgactgcagtaattttatcgctttgtcgaccacataatcgacatacaaaatcgtattatcgtaggtattggtgagctgctgctgggtgcagctctgaatctcgttggtgtcgcaggtgggcgtaaactgtttaaactgcgccggataacgattgtagtaggttgggccgtggctgccgatagtgtgcagcacgataatcccgtcctgctgcagattatcgatatagttctccaggttatggaacagcacctcatcgtagcattctccgtcgatgcactggccgctaagcttgagatcggtgacgttctggtgcggtacccggtcgcaggctcctttacagccgccgtcgttatcattccactgaacctgaattcccgcgcgctgcaggatatccagcacgccttcctgatggtgcgccagctcttcatcatagtgggcccgcggcatattagagaacatgcacggtacagaaaccgcggtcgcggtgccgcaggacgtggtgtcggggaaatagatgacattatcctgtttcaggcgcgggttggtctcgcgggcgtagccgttcagggaaaagtttgccgcccttgaggtttcgcctaacaccacgatagtcaggtttttccgcggtccgctgcgcatctccggcttctgaaccgcgtcttcgccaattttgaccagcggaagattatccatcctgttatgcgcataccaggagttcacggccacaatgctgtttgacgggctcagggacttaaccagctctttgttattgcgaaacagcgaggcgtaatctttatagaaaaatgccgcgaccagaataatcagcagcgctgaaaccacgatgctcaacagccttaccgccacgctgcgccacagggttgccggtttgcggattttaacccaccaggccacgaccaccgccaggatgccggagagtcccaggatcaggaccatttttccggagagtagcgcaaagctttcggcgggagtggtatcgagaatattggtgatcatcgcccgatcgataatcacgccaaaggtccagataaaatactgggccgaggcgctaagcagaataaacaggctgataacgaggcggtcaagcttaagaaatgacgctagcgtggtgatgatattcatcacgctgatagccactatcggcatactgaggaacaccagccagttatgcaggccgttgaccggcagcagggtaaacgcctggcgatagaaagcaatgttcagcgccaggccaatatagcaggcgaacagaatcaaatagaccgtacggttaagcattggccgacgtaaagaaaataacgacatagcgaagtccacataaagagatgttcgctatgctgcccgttttttttaagacaaccttaagattttaagcctgcctgtttttgtcgcgaggataaggccgcgttgaggattagcctaaggcctgaatcgctttatccagcgcgcggcgcaacagctggcgatcgtgacgatagggcacatcgctggcgtccagaggcgtctgaatgacgacccgatccttaacccctgcgatatcggctttcgggccgacaaccagcgcgtcaatcacccgtttaccaatctgctgctccataatggcgaccctgtccgccagcgtcaggctggctgccgggctatgctctttgccgaggttatcgataaacaccattggcgcgggcgtgcggcgcagcgccttcgccatctcatcaagcagcagaatcggcatcaggctggtatagaagctgccggggccaatcaggattaaatcggcttcggcgatggcttctatcgcttcacgagtggtgggcaccggcggggagagcataagctcgcgcggcacgctggcaagctgatcgatattcacttcaccgtaaacttcgtgcccttcatggtcgatggccataagatcgaccggttgttccgacatcgggatcagaaacgcgtcgaccttaagaagattcctgatcaaattgatcgcttcaagcgggcgcacgctcaggtgatccagcgccttaagcatcaaattgccgaggttatgcccggaaagctcgccgttgccgctaaaacggtactcaaacatcgccgaggccacgctgggttcggcgatgagctgattaatacagttgcgcatatcgccccaggcgatgccgccttccgcgcgacgaatgcgccccgtagagccgccgttatcggtcgtggtgacgatgccggtgaggcgtgaaccgagcgaagagagggatgacattacccggcccagcccgtgcccgccgccgagtgccaccacgcgatccagatcggcgaaagtgcgattgcgcataaaaatcccttataaccatttatcgggctcacagtaaccgatctacccctaaaagacgatgggctgaatctgacaaactgaccgacatcaatgcaaaagcgtggtttttagctattctgtagcgaaaatacgcgatcgtatcgatatatacatgattatataacgaaactggaaatggcataaccgttattaaagcgctactattcggcgtaacccactaacactctagcctctgtgcctgtgtcgaaagatatggtgctttggccgtgacaacttcggttgccaccagggcgcgaaaagaaatgaccgcgtctcccgtatttggaaaggtgtctatggcttcacagcttaccgatgcatttgcgcggaagttttactatctgcgtttatcaattaccgacgtatgcaactttcgttgcacctactgtctccccgatggctataagcccggcgccgtcaccaataaaggctttctcagcgttgatgaagttcgccgcgtgacgcgcgcgttctccgccctggggacggaaaaggtgcgcctgaccggcggcgaaccctcgctgcgtcgcgattttaccgacatcatcgccgcggtgcgggaaaacccttctattcgccagattgcggtcaccaccaacggctaccggctggcgcgcgacgttgaaagctggcgcgatgccgggctgacggcgattaacgtcagcgtggacagcctcgatgcgcgtcagtttcacgccatcaccggccaggacaagtttcatcaggtgatggacggcatcgatgccgcatttgccgctggcttcgaaaaagtgaaggtcaataccgtgctgatgcgcgacgttaaccatcaccagctcgacacttttctggcgtggatccagccgcgccgcattcagctgcgttttattgaattgatggaaaccggcgaaggcagcgatctgttccgccgccatcatatctcgggcatggtgctgcgcgatgagctgctgcgtcgcggctggatccatcagatccgccagcgtagcgacggcccggcgcaggtgttttgccatccggattatgccggggaaatcggtctgattatgccctatgaaaaagacttctgcgccacctgtaaccgtctgcgcgtctcttccgtgggtaaattgcacctgtgcctgtttggcgaaggcggcgtcgatctgcgcgatctgctcgccgatgagcggcagcagccggcgctggaggcgcgcatatccgaggcgttaacgcataaaaaacagacccatttcctgcatcagggcaacaccggtattacccagaacctgtcctatattggcggataattcattttaaggagcgatcagatgagccaggcaagcgctgagtttatcccgacccgtattgctattctcaccgtctccagccgacgtggcgaagaagacgacacctccggacactggctgcgcgacgcggctgaggaggcggggcacgtcatcgtcgataaggcgattgtgaaagagaaccgctacgccattcgcgcccaggtgtcggcgtggattgccggcgatgaggtgcaggtggtgctgattaccggcggcaccggttttaccgacggcgaccaggcgccggaagcgctgctgccgctgtttgaccgcgaagtggaaggtttcggcgaggtgttccgcatgctctccttcgaagagatcggtacctcgaccctgcagtcccgcgccgttgccggggtggcgaaccgcacgctgatttttgcgatgcccggctcaaccaaagcctgtcgtaccgcatgggacaatattattgcgccgcagctcgatgcgcgcacgcgcccgtgcaactttatctctcatcttaagaagtaatttatgacgcagttgacccatattaacgccgccggcgaagcgcacatggtcgatgtctcagggaaagcggagacggttcgcgaagcgcgcgccgaggcctatgttgaaatgcaggccacgacgctggcgatgattatcgacggtagccatcacaaaggcgatgtctttgccaccgcgcgcattgccgggatccaggcggcaaaacgcacctgggagctgattccgctttgccatccgctgatgctgagcaaagtcgaagtcaatctgcaggcgcagcccgagcataaccgggtgcgtatcgaatccctgtgccgtctgaccgggaaaaccggcgttgagatggaagccctgaccgccgcttccgtcgccgcgctgacgatttacgatatgtgcaaagcggtgcagaaagatatggtgataggtccggtgcgcctgctggcgaaaagcggcggcaagtccggcgatttcagagtggaagatagccatgattaaggttctttttttgcccaggtgcgcgaactgctcggcaccgactccctgaagctcaatccgcaaggcctgaccacggttgaagccgttcgccagcagctgatcgcccgcggcgaccgctgggcgctggcgctggaggagggcaagctgctggcggcggtaaaccagacgctgacgacgtttgatcacccgctggcggccggtgatgaagtggcgtttttcccgccggttaccgggggataacatgacgcagacgcgtattatagtcagccatgaccgctttaaggtcggcgacgaatacccctggctggccgagcgcgatgaagacggcgcggtagtgacgtttaccggcaaggtccgcaaccacaaccttggcgacagcgtcaaagcgctgaccctcgaacattatccggggatgacggaaaagtcgctggcggagattgtggaacaggcgcgcgagcgctggccgctgggccgggtgacggtgattcaccgtatcggcgagatgtggcccggggaggagattgtctttgtcggcgtcaccagcgcccaccgcggtagcgcgtttgcggcgggggagtttattatggattacctgaagacccgcgcgccgttctggaagcgggaggcgacgccggaaggcgagcgctgggtcgatgcgcgagatagcgaccgtgaagcggcagaacgctggtagtgtggtacgcttagaagataaatttcgttaatcaggagacagtcatggatagatatcctcgttccggggcgatcgtacagggtcgcagcggacttcaaacttatatggcgcaggtgtacggctggatgacggtcgggctgctgctcacggcgtttatcgcgtggtttgcggccaacacccctgcggtgatgatgtttgtcttttccagcaaaataacctttttcggcctgatcatcgcccagctggggctggtattcgtgctctccggcatggtgcagcggctgagcgcgggaatggcgaccaccctgtttatgctctattcggcgctaaccgggctcaccttatccagtatattcctcgtctatacctactcatcgatcgccagtaccttcgtggtggcaggcgggatgtttggcgtgatgagcctttacggctataccactaaacgcgacctgagcggcttcggcaatatgctgtttatggcgcttatcggtatcctgctggcgtcgctggttaacttctggctgaagagcgaagcgctgatgtgggcggtgacctacatcggggtgatcgtcttcgtcggcctgaccgcctatgacacccagaagctgaaaaacatcggcgagcagattgacgttcgcgatgcgtcaacgctgcgcaaatactcgattcttggggcgctgacgctgtatctggactttatcaacctgttcctgatgctgctgcgcattttcggcaaccgtcgttaactcgttcccggatctcaggcggtggtaaacctgtagccccggtcagcatcagcgaccggggcttttttgactactcgcccgccagcttgcgctggtttttctcccgcagatgcttcgcccggctctccagaatcaggtagccgatggtcgccagcagcagcggcaggaagtagtacagggcgcgataggcaagcagggcggcaataatcgcgccgcgcgaaatctcttccccggaaagcatggcgataaataccgcctcaagcacgccaatgcctgccggaatatgcacgataacccccgcaatgctgctgaccagcagcacgccgagcacgagaaaatagtccacctgcgggcccagcagcagccagataatcgcccccatcgccatccagttcaggctggaaaccgccatctgcaatatcgcgaagcgccaggacggcagcaccagccgctggccttttatcgtcagatggcgctttttagcaaaggcacaggcccacaggtaaaacgcggaaatcagcagtaaaacgacgcccagaatttgcagcgacgactggctgatataccagcgctcgggcaccttcaccatgccggagctaaaaataatgccgccgagcagaatatagcccagccagttggtggtaatgctcagggagaagatacgggtaatggttgcgccgctcaggccgaggcgcgagtagagccgatagcgcataccaatcccacccacccaggtgctgagcgtcaggttaaaggcgtagcagataaacgacaccagcatcacctggcgtttcgccagcttgtggccgcagtaagcgcgccccagcaggtcgtagcagccatagatcaggtagctggcgataaccaacccgatggcgctgagcagcgccgtacggttgtaatcgcgaatgaccttccacacgtcctgccagtcgattttttgcgcgtagaccaccagcagaacgacgacggcgataaaaaagagcaccgtcaggatttttttcgccatctgccagcgagggtgagatttcgccatcaggatttcacctcctggttttccgggtccacgcggtcctgggtttctatttctggctgtaccgggggctgaacccgcgacagcagcggcgtatgggccggtagccatccgacccaggcagggaagtggcgcaggaagtggaacgccagcacgctaatgccgagccgccaccatgttcgtttcgacaaaatgcgcttatcgacctcgcggcagtcgttaaggattaagccattgagattatcgcgcagcgtctggttaaactcgcggtcgtgaatcaccaggttggcttccagattcagcgacaggctcagggggtcgaggttgctggagcccaccgtggcccagtgatcgtccgccagcgccactttgccgtgcagcggacggcggcgatattcgaaaatctgcacgccgccttttaccagatagtggtagagcaggcgcgcgccgaatttgacaatcggaatatccggctcaccctgaacgatgagcttaacgcgcacgccgcggcgggcagcgttgcgcatagcgtgcagcagccgatagcctgggaaaaagtaggcgttagcgataatcacttcccggcgggcgctggtcagcatcttcagatagtgacgctcaatatcatcgcgatgatcctgattatcccgccagataaacagcgcctgcgcctcgccggggttgcggttgatttcaggcttatgccgacgccgctgccaccagcgtcgggtcgcttcgctggtggggaggttttcgagttcaaattgcagaatatcgatcaccaccggcccttcgacctgtacggcgtaatcctgtttggcctccggaccgtaatcggtcatgtgctcggcggagtagttaatgccgccgacaaaggcggtaacgtcgtcgatcaccacgattttgcgatgcatacggcgaaataaattagtgcgcatgccgagcaggcgcgggcgcggatcgtaatagcgaaaaatcacgccagccgacgtcagctcgcccacaaagctttcgcttaaatccggcgagccgtagccgtccagtaagacctcgacgcgcacgccgcgctgggccgcttttaacagaacggcatggagctgtttgccgacgtcatcttcaaaccagataaaagactcaaggatcacccgctgctgcgctcggccgatggcggcaaacagcgccggataatagttatcgccattttctaatagccgaatgcggtttccttcctgccagctgcatttcacagatgtatctccacgctaagcggtgcatgatcggacagatgacgccactgttttaacgccagcgctctgggctggctggcgtgggcgttttttacgtagatgcggtcaagtcgcagcagcggaaagctgaccgggaaagtgcgcgccgggcgccctctggcgcgggtaaaaatctcctccagcccggcctgggctttaagctggcggttcgcctgctgccgccagtcgttaaaatcaccggctaccaccaccggttcgcccgcgggtaaaccgttcacccagtccgccagcatcgtcagctgggcctggcgttgatgagcgcgcagtcccaggtgtacgcagaataaatggatagcgatgccgctttccggcgggacgatgcggcagtagagcaggccgcgcttttcgctgttgccgaccgaaacatcgagattttgataatgttcaatgggaaagcgggagaggaccgcgttaccgtgatgcccttccgggtaaacggcgttgcggccgtaggcgtaatcgctccacatggtatcggccagaaactcatagtgggtggtatccggccagttttcgatatgcagcggatgaatttcgtgcgcccccatcacctcctgcaggcaaacaatgtcggcgctgacgctgcgcaccgcttcgcgtaattcgggcaaaataaagcggcgattgaacgcagtaaaccctttatgggtgttaattgtcagcacgtttaacgaaaatcgcggcatttgtttgtccttatttctctgggcaatgtcactttcctgtaggaaatagtgtagtagaggtcacaaaaagatgcggtgatacggaattttccgtaaagtgcggtactctgagtagcagagaaaaatccttcaggagagaagccatgaagtggcaacaacgtgtacgcgtcgcaacgggtcttagttgctggcagattatgttgcatctactggtcgtggcagtactggtgatgggttggatgagcggcgcgctggtgcgcgtcggattaggtttgtgcgtgctgtacggcgtcacgttagtgtcgatgctgtttttgcagcgccatcacgatgagcgctggcgcgacgtcggtgatttccttgaggaactcaccaccacctggtacttcggtaccgcggtgatcgtgctgtggctgctgtcgcgcgtgctgcacaataacctgctgctggccctcgccgggctggcaatactggccggtccggcggtggtttcactgctggcgaaagataaaaacagatacgctaaatcgttcgggctacaacaaggcggcaacgcagcgaatccccagaagcatagataactatgtgactggggggagcaaggcgagccaacgcagttgtggcttgaacgatgacgagtattacgcgatctttcttcggaacatcgcatacgccgccgagccggtggtggccgctatgaccagtagcggccacaaacttccccacacgatttccagactcgcatccttcaaatagatctgcttggtgatatcggtgaaatgacgaatcgggttcacccacgtcaggttttgtagccataccggcatattttccaccggcgaaacgtagccggagagtaaaatcgccggcatcataaagacgaatacgccgataaacgcctgctgctgcgtggagcacagcgacgaaatcagcagtccgaatcctaccagcgacagaccgtaaacgatcatcgtgaagtaaaacagcagcagtgagccagcgaagggaatctggtaggcccagataccgatccccagcacgatggtcgcctgaagggtggcgacaatcagcgccgggaccgctttaccgataaagatctgccatgttgccagcggcgagaccagcagctggtcgaacgtcccctgttcgcgctcgcgggcaacggagagcgaggtgacgatcattacgccgatggtggtgatcatggcgatcagcgacggcaccacgaaccatttgtaatcgagattcgggttataccagttgcgtaccaccagctcgctattgttcggtttggctttgccttccagcaggtcctgctgatagcttttgacgatctgctggaggtagttggcggcaatttgcgcgctgttggagttgcgcccgtccagcagcagctggagcggggcggtctggttggtgtcgaggttgcgcgaaaaatccgccgggaaacgcacgaccaatagcgctttttgttcatcgatggtcggtcttatttcctgagggcttttcagtaacagcacgtgggtgaaggctttggcgcgggcaaagcgctgggtcagctccacggcgtgcttgccgttgtcttcgttatagatggcgatggtggcgttcgttacctccagcgtggcggcaaaggggaacagcagcacctgaatgagcaccggcataatcaaaatcgcccgcgtctgcggttcacgcaacagcgactgcagctctttgcggattaacgtccataagcgatgaaacatctcatattctctctttgtgagccccggattgcgctgcgcttatccgggctacccgtttgccagcccttgtaccggggggcgcgcaggcaaattaatccagacgccgtttggttttcagccacgtcaggccgataaacatcaccgccgaggcgattaaaaacatcacattcaccagcagcaccaccgggatgttgcccgccagaaacaggctttgcagggtgctgacaaaatagcgcgccgggatcacgtaggtcaccgcgcggattatcgccggcatgctgtctatctgaaaaataaacccggacagcataattgaaggcaggaacgcggcattcagcgcgacctgcgcggcgttaaactggttacgggtgatggtggaaatcagcagccccatgcccagggtactcagcaaaaacaggctggtaataaaaaacagaatcaccagcgaaccgcggaacggcacgccgagaataaacaccgccaccagcatacacagcagcatcgccagcatgccgaggaaatagtaggggatcagcttgcacagcagcagctcggcgcgggtaatctcggtcgacagcagcgcctccatggtgccgcgctcccactcgcgggccaccaccagcgaggtcaggatcgcgccgactaccgtcataatgatggtaatcgcgcctgggataataaaatgctggctgatcgcggccgggttaaaccagtagcgcgtctgcacgtcgattagcggctcgaaggtttcgccgcgatcttccgcccgctgctgctgccagatttgccagatgccttcgacgtagccctgggcgaagttagcggtattgggttcgctgccgtcggtgatgagctggatcggcgcatcgtcgccggggcgggccatcttctggtcgaagtccaccggcagggttaccagggcgcgaatgcgtcccgcctgcatcatctgcaccagttcctggcggttatcgctgatggtggcgtcgatataaggggagccggtcatggtatggacaaaatccagcgcctcttcgctctgctgctccagcagcacgcccacccgcagcttgctggagtcgaggttaatcccgtagccaaagataaacagcagcagcagggggatgaccaccgcaatcagccagctgctggggtcgcggacaatctgccgcgtctctttcacgcacagggcgcgtacgcgccgccacgatagcagtttaccgctcaccggcgttctccttatcccagtcgtgaatgagggtgataaacgcctgctccatcgttggatcaggctgttcatcatccgccgccagcgccttcagatcgtccggcgtgccgctggcgatcagtttgccgcgatagaccaggccgatacgatcgcaatactccgcttcatccataaagtgggtagtgaccatcaccgtcacgcctttatccaccatgctattgatatgcagccagaattcgcggcgggtgaggggatcgaccccggaagtgggttcatcaagaaacaggatatccggctcgtgcatcagcgagcaggccagcgccaggcgctgtttatagccgagcggcagatcgtcggcggcctgccgggcgatgcttttcaggccaaacgcctcgctcatgctggcgattttgtcgttctgcgcccgtccgcgcaggccgtagacgccggagaagaagcgcaggttctgctcaacggaaaggttgccgtagagcgagaacttctgcgccatatagcccagatgctgacgcgccttgccggagctgactttcaggtccatgcccagcaccagcgctttcccggaggtggggaccagcaggccgcacatcatcttaaacgtcgtggactttcccgcgccgttaggcccgaggaggccgaaaatctccccgcgtttgacctgaaaatcgacgtggtcggtggcggcaaaatcgccgaatttcttggtcagggtctgcgcttcaatcaccgtgtcctcacgggagcctcccacggtgtggataatgttgcccagcggcgattcggcagtcccggcgccgcccagcaggtcgataaaggcatcctcgaagcgcggcgcggtttcggcgacctccagcggcggcatatcgccagccttctgtacatcgctgatcctggcctcttttttaaggatcaggcgtaccgatttaccctgaatcacgccatcgctgacctgcggcagcttcagcgtacgctggaggaggcggcggttattctcccgggcgctggaaaccaaaaagctgcgtccggccatggtctgcgtcagctcttttggcgccccctggtagagcagctggccctcgttcatcaacagaacgtcccggcactgctcggcctcatcaagataagaggtgctccagaggatcagcattccgtcgcccgccagttcgtgcaccatctgccacagttcacggcgcgagatagggtcgacgccgacgccgggttcgtccagcagcaggactttcggttcgccgacgagggtgcaggccaggccaagtttctgcttcatgccgccggaaagcttgcccgccagccggccggtaaaggggccgagggaggtaaactccagcagcctggcgaaggttttttcccgcgcctcgccggtcacgctgcgcagatcggcgtagagcgtcaggttttccatcaccgtcagatcttcatacaggccgaatttctgcggcatatagccgagcaccgcatgcagggcgctgtcgtcggcaatcgggtcgaagccgatcactttttcgctgcctgcgtcgggcttcagcagcccggcgagcatgcgcatcagggtggtttttccggcgccatccgggcccaccagaccggtcacatagccggagtgaatggtgcagtccagcggcgcgacggccgggcgatccatgccggcaaagcgccgggtcaggccgctcagcgtaatcacgtcctcgctcattggccgtttccgtgactgaaggtgacggtgaccggcattccctggcgcagcgcgtcgtcggcatcggtgaccacaatacgcaggcgataaaccagatcggtgcgcaggtccggcgtttccacagttttcggcgtgaattcagcggttggggagacgaagccgattttgccgcggtagggtttatccgggcgactatcggtgtaaagcagcacttcgcgacccggctgggcctgaccgaggtttttttcatcgatataggcgcgtacccacaccggatgggttaacgataacgtcatcaccgtgccgccagcgctgagcatgctgcccggctcgacggcgcgggtcatcagcgtcccgtcggacggcgaggccagcgtggtatcgtgcagatccagcttcgcctgtgccagcgcggcctgcgcctgttcaaggctggctttggcctgggcgatttcctgcggacgattaccggcgcggtactggcgcagcttatcctgcgcggacttcagcgtcgcctgggcctgatcgcgcgatgagcgggcgttttccaggtcgttagcggagatggcgctgcttttgcgcagccccagctggcgctggtaaaaattctgcgcatagtcgtaagcggcctgcgcctggttgaccgcggcggcggcctgagcgatctcttccgagcgataccccgccatcatcaggtcgtactgcgcctgggcggtggaaacgttggcctgagcctgctgcagggcattctcgtagggcgcgcggtccagctcgcccagggtctgcccggctttaatcgcatcgccctcgtcgacgctgagcgacgccagccgcccgcccacgcggaagctgaggttgacggtacgaatatccacgttgccatacagcgtgagcgctttctgctggctgctctggtaccaccaccagcctccgccaatgacagcggccagcaggagaagcagcacaacgacgatgagcggttttttcatgactccagactcctttgcgataatccttccagaacgaaatcaatatggcaggtgataacctcaataatttgcgcggttttgtcccgatcgaactcagcccagcccgcgcggcgcagcaccgtttcccgaccaaggcgaaaagcgagaacttcgcccagcagcgcgtgggtgtggaggaccatttccgtgctgtcagcgttaaggccggtataggcggcgattaagcgggtcaggtagcagtgtagcggagcaatcacctgatcgtggatgagccggtaggccggcgttggcgacagctgctcgcgggagataaatttgctcaaattgacggtgtcgtcctgggtcagcagcaaaatcatattctggcaggcgcccagtatcagggtgcgcatggcggctttatccggaacaggctcagcgcacagcgcttccgccgcctgcgcgtgggggcggaaattgtgctcgataaaatcggcaatccactgggcgcaggcgagatagagatcgtccttggaaccaaaatagtaggtaatggcggcgatattctgcccggcctgggcggcaatatcgcgggttgtggcgtgcaggccgtattcgccaaactgggcgattgcggcggcgataagctggcttttcgcctgctcgcccttactggtcgtgggagtggttgtcatcgcgcgagaaaagttaatcaatcgattgattaactctaggcgcaggttggcggtttgtccaccgtttgctgctagatatgaaatccttcgcgactcagctcttcggcaacccaggcaaagaagatcttcactttctctttttgttcattcgggtgcggtaaaacgaagtgatgcgcgttaaccggcatgctgacgtcgcgggtaaagacgggttccaggtggcgttggctcacgctctgcccggccagcaaattactctcaagaataatccccattcccatccgggcagcctcaatactcatataggagcggtcgaaattaaaaataaagtttttattccagccgcgaaccttatgccacgacagccagttgctccagccgatcagcgtgctatcggaatgaataaggtcgcaggccagcaggtcttcaatggactgaacgtcgcggccggctaaataagtcgatgagctaaaggggagcacgcgttcattttttatggtcttgaccaccagggttggccactgtgagagcccgtggcgaatatcgatatcaatattatcgcgggagaactggatgctttcataagagcaggtcaggctaattttaagctccggccaggcctggcgaaatttatccagacggggcatcagccacaataatccaaagctcggcgcggaatgaatccgtaaataatcctggtggatatcattaatcacctggttagtggcctgaccaataatatttaacgccccggaaacctctttaaggtatttttcgccaattgtggttaataccatccctttactgctacgggaaaatatcttttttcccagatactgttccaggctggctatctgatgacttaccgcggaggccgtaatattaagattctctgccgccaggttcaggctgccggtatcggccacttcaataaatgcctgaatattacgtaaggatggcatcggcaagcttttattctgcagcggctggttcatgatttcctccggcgggggggaataacgcaaggcgatttttttactcagaaagaaggacgtccagccgttatcccagaaaatgatggtcagcatagcacagccggaaaataagtgatggcgcaatccgtgatgaagttaacagttttaaatgcacaactctcgaaaaaataattgacaggaatttgagtgcagtcacgaagcaaatttttctcacgcgtaattgagcttttttgaataccctttctttttgggattgttatattgcaactacaggcctgataacagggcgcgatgcggtaagggtcgcgacaaaaacataaaaaaataaagaggataccctatgtcacgtatagatactgttgtctgtactgacgccagaaaaacaaaatatcgtttcgtggtattgacgatgattttcctggtgtatgccataaattacgccgacagaacgaatatcggcgcggtactgccgttcattattgacgagtttcatatcaacaactttgaggccggggccatcgccagcatgtttttcctcggctatgcggtaagccagatcccggccggtttttttattgccagacgcggcacccggggactggtctcgctgtctattttcggcttttccgcttttacctggctgatgggcaccgtgagctcggtgtttggcctgaagatggtgcgactggggctggggcttagcgaagggccgtgcccggtggggctggcttcaaccattaataactggttcccgccgaaagagaaagccacggcaacgggtgtctacatcgccgccaccatgtttgcgccgataatcgtaccgccgctggcggtgtggatcgcggttacctggggctggcgatgggtctttttctcctttgcgataccggggattgtggcggcggtcgcgtggtacctgttggttaagtcaacgcccgcggaaagcggatttgtttcgcaacgcgaactggaagagattaatgccgggcgtgaaactgataaaaacgccgtccgcgaaaatatattaattgccgaccgcttcacctggctggataaaattattcgggtgaaaaagatggcgcctgtcgatacggcgaaaggattatttacctcgaaaaatattcttggtgactgtctggcctattttatgatggtcagcgtgctgtacgggttattaacgtggatcccgctgtatttagtgaaagagcgcggttttgacgtgatgagtatgggcttcgtggcgagtatgccgtgcatcggcggctttattggcgcgattggcggaggctggatctcggataaagtgttaggccgccggcgtaaacccaccatgatgttcaccgcgatttcaaccgtggtcatgatgctcattatgctgaacattccagcaagcacctgggcggtatgtattggattattctttgtcggtttttgtttgaatattggctggccggcttttaccgcctacggaatggccgtttcggacagtaaaacctatccaattgcctcttctattattaatagcggcggcaaccttggcggctttgtcgccccgatggccgccggttttttacttgatcagaccggcagctttaattctgtatttacctattttggtatctgcgccgcaataggtctggtggtgattcttttcctcgatgagccacaataacggcaatatttctgttaattaatatgacgtcatgtcatggagtgaaaatatgttattaaaagataaagtcgccattattactggcgcggcctccgcacgcggtttgggttttgccaccgccaaattatttgccgagaacggcgccagcgtggtcattatcgacctcaatggcgaagccagcaaagccgctgcggcggctctgggcgaaggccatcttggtctggcagcgaacgtcgccgatgaagttcaggtgcaggcggcaatcgaacagattctggcgaaatatggccgggtcgatgtgctggtgaataacgccggcattacccagccgctgaagctgatggaaattaagcgcgccaactatgacgcggtgctggacgtcagcctgcgcggcacgctgctgatgtcgcaggcggttattccggcgatgcgggcgcaaaaatcaggcagcattgtctgtatctcttcggtttccgcccagcgcggcggcggtatcttcggcggcccgcactacagcgcggcaaaagccggtgtgctcggcctggcgcgggcgatggcgcgcgagcttggcccagataacgtccgcgtaaactgcatcacgcccgggctgattcagaccgatattaccgccggcaagctgaccgacgacatgacggccaatatcctcgccgggatcccgatgaaccgtctgggcgatgcggtggatatcgcgcgtgccgccctgttcctcggcagcgatctctcttcctactcgaccggtatcaccctggacgtgaacggcggcatgttaatccactaagcgaggcaatcagatgaagatgacagaaacacaacaagttgccgcggcggcgtggcgtatccgtcgctatgccctgcaaatgggcgaagtccagggacagggctatatcggccaggcattaggctatgcggatgtgctggccaccgccttcagccacgcgatgcgctaccgtccggaagatccgcagtgggaagggcgtgaccgttttctgctctctcacggccattacgccatcgcctattatgcggcgctgctggaagcgggaattatcccggaagaggagctggagacctacggttccgacgacagccgcctgccgatgtcgggcatggcgacctatacgcctggaatggagatgtccggcggctcgctggggcaggggctctccatcgccgtcgggatggcgctcggtctgaagaagaagggcagcgcatcctgggtttttaactctatgtcggatggggagctggacgaaggttcaacctgggaagcggcgatgtcggcggcccactacggcctgactaacctgattaacctcgttgacgtgaacaaacagcaggcggacggcgattcgcgcaaaattctcggctttgagccgctgcatgaaaaatgggccgccttcggctggtacgtgcagcgcgtggacggtaacgatctggcggcggtggtggccgcttttgataacgcgaaaaatcatgcgggcaaccagccgcgggtcattttatgcgacacgctgatgggcaaaggggtgccgttccttgaaacccgcgataagaaccattttatccgcgtcgatgccgacgaatggcaaaaagcgattgcggtgctggacgccaacaaaccggaaggagtgctgtaatgagccagagtaaaccacgcttaaaaacgtcggcgatgatcgcctccattgctgatgaaggtcaggcgaccgtttccgcgccgtttggcgtcgcgctctcgaagctggcggcccagcgcgcggaaatcgtcggtatgaccgcggacctgtcaaagtataccgatctgcatattttcgcccaggcctttccggatcgcttcttccagatgggaatggcggagcagctgctgatgggagccgccgggggaatggcgaaggagggatttattcccttcgccaccacctacgccgcttttgccacccgtcgcgcctatgattttatccatcaggtcatcgccgaagagcatctgaacgtgaagatctgcgcggcgctgccgggcctgaccaccggctacgggccgagccatcaggcaacggaagatctggcgattatgcgcggcattcccggcatggtcatcgtcgatccctgcgatgcgctggagatagagcaggcggtaccggcgattgccgaccacgacggtccggtgtatatgcgtctattgcgcggtaaggtgccgctggtgctcgataaatatgattatcagtttgagctgggcaaggcgaagctgctggaggacggtaacgatgtactgattatctcttccgggctgatgaccatgcgcgccctcgaggcggttgaaaaactgcgggccgataatatcagcgcggcggtgctgcatgtccccaccatcaaaccgcttgatgaaaaaacgatcgttgcgcaggcttcgaagcccggccgtctggtggtgaccgcggaaaaccacacgtcggtcggcgggctgggggaggcggttgccgcgctgctgatgcgtaaaggcgtacgctgcgagctggataccgtcggtttgcctgacgaattcctgctggccggcgcgcttccgacgctgcacgaccgctacggcatctccaccgcgaagatggtcgaaaaaattaagtatcgcctgcgttaatcgccttcgccgccgcgttctgcggcggcgtttctctgcttttgttcgcggtttccccgtcgaggcattaaacgggctatttcggggacgcctggcgcgaagcgccatcgccgcttctcatcgacaggacggggagcagtggtttgttagccggaggattcttttcggcagattttatgcggttcgtcacaaaatctgctagactgcgcagcttcatggcattgtggtttttgccatctctttcgcaataatctccctgaaaactacgcctgtgacgggccggggcggttcggagttgttatgtcttttgattcccttggcctgaatcctgaaatcctgcgcgccgtcgctgagcagggctacgttgagccaaccccaattcagcagcaggctatcccggcagtattacagggtcgcgatctgatggccagcgctcagaccggtaccggcaaaacggcgggatttacgctgccgctgcttcagcatctgatccaaaaggagccgcatgctaaagggcgtcgcccggtgcgtgcgctgatcctgaccccaacgcgcgagctggcggcgcaaattggcgagaacgtccgtgattacagcaaatacctcaacgttcgctcgctggtggtgttcggcggcgtgagcattaatccgcagatgatgaagctgcgcagcggcgtcgatatcctggtggcaacgccgggtcgtctgctggatcttgaacatcagaacgccgtgagcctcgacaaagtcgaagtgctggtgctggacgaagccgaccgtatgctggatatgggctttattcacgatattcgccgggtgctggcgaagctgccggccagacgtcagaacctgctgttctccgcaaccttctccgatgacattaaatcgctggcggaaaagctgctgcataacccgctggagatcgaagtcgcccgccgcaacaccgcctctgagcaggtgagccagctggtgcattttgtcgataaaaagcgcaaacgtgagctgctgtcgcagatgatcggtgaaggtaactggcagcaggtgctggtctttacccgcaccaagcacggcgcaaaccatctggcggaacagctcaataaagacggcatccgcagcgccgctattcacggcaacaagagccagggcgcgcgtacccgcgcattggctgactttaaatccggcggcattcgcgtactggtggccaccgatatcgccgcgcgcggtctggatattgaagagctgccgcacgtggtgaactacgagctgccaaacgtaccggaagactatgtgcaccgtatcggtcgtaccgggcgcgccgcggccacgggtgaagcgctgtcgctggtttgcgttgatgaacataaactgctgcatgatatcgaacgcttgctgaaaaaagagatcccgcgtattgccctggcgggctacgagccggatccatcgattaaagccgagccgattcagaacggtcgtcagcagcagcgcggcggcggtcgcggtggccagagtcagggccgcggtggccaggggcaaggtcgcggtcagcagtccgctccgcgtcgtaccgatggcgaagcgccgaaagcgcgaactcaggacggtaagcctcctcgccgtcgtcgcccgcgcaaacccgccgcggcggagtaacactatcccgtcactcctgtggcgagagccgcgatcgcgcggctaagccactgatgggttgtccgggtaagactccttacccggacgcgcttcgctcagcataacctcgagcgtgattccagtttgctcagaaagacgttccttccgacggctaaaaaatggcacaatagtggctgtttatacagtattcaggttttctcatggctttgaccgcagcgctgaaagcgcaaatcgccgcctggtataaggcgcttcaggaacaaatccctgactttattccccgtcctccgcagcggcagatgattgccgatgtggcgaagacgctcgccggggaagaggggcgacatctggcgatagaagccccgaccggcgtcggcaaaaccttgtcatacctgattcccggcatcgccattgcccgtgaagaacaaaaaacgctggtggtcagtaccgccaacgttgctctgcaggaccaaatctacagtaaagacctgccgctgctgcgcaaaatcattcccgacctgcgatttaccgccgcctttggccgcgggcgctacgtctgcccgcgtaacctggccgcgcttgccagcaccgagccaacgcagcaggatttactggcctttcttgatgacgaactcacgcctaacaaccaggcggaacagaagctgtgcgcgacgctgaaagcggaccttgatagctacaaatgggacggcctgcgcgatcataccgataaaaatgtggatgattcattatggagccgcctgagcaccgataaagccagctgcctgaaccgcaactgccactattatcgcgaatgtccgttttttgtcgcccgccgggaaatccaggaagcagaagtggtggtggcgaaccatgcgctggtgatggcggcgatggaaagcgaagcggtgctgccggaaccgaagcatctgctgctggtgctggatgaaggccaccatcttccggaggtggcccgcgatgcgctggaaatgagcgcggaaatcaccgccccctggtaccgcctgcaactggatctttttacgaagctggtcgcgacctgcatggagcagtttcgccctaaaaccacgccgccgctggcgaatcccgagcgtctgaatgggcattgcgaggagctctatgagcttatctcctccctgaataatatcctcaatctgtacatgccggccgggcaggaggcggagcaccgcttcccgatgggggagctgccgcaggaagtgatggagatttgccagcggctggcgaagctcaccgaaacgctgcgcggtctggcggagctgttccttaacgatctgggcgaaaaaaccggcagtcacgacgtggtgcgtttgcaccgggttctgctgcagatgaaccgagcgctggggatgtttgaaagccaaagtaaactgtggcggctggcatcgctggcgcagtcctccggcgcgccggtgaccaaatgggtcacccgcgacctgcgggatggccagatgcatatctggttccactgcgtggggatccgcgtcagcgatcagcttgagaggctgctgtggcgcagcgtcccgcatatcgtcgttacctctgcgacgctacgctcgcttaatagcttttcgcgtctgcaggagatgagcgggctgaaagagaaagcgggagaccgctttgtggcgctggattcgccctttaatcacgtcgaacagggtaaaatcgtcattccgcagatgcattatgaaccgcttatcgataacgaagagcagcatattgccgagatggccgcctatttccgggaacaggttgagagcaaaaagcatctcggcatgctggtactcttcgccagcggaagagcgatgcagcggtttctcgaacaggttaccgatctgcgcctgctgctgctggttcagggggataagcctcgctaccggctggtcgagctgcatcgtaaacgcgttgaaggcggcgagcgcagcgtactggttgggctgcaatccttcgcggaaggcctggatttaaaaggcgaactgttaagccaggtgcatatccacaagatcgctttcccgccgattgacagcccggtggtgatcaccgaaggcgaatggctcaaaagcctcaaccgctatccgttcgaagttcagagcctgcccagcgcgtcattcaacctgattcaacaggttggccgcctgatccgtagccatagctgctggggagaggtggtaatttatgataaacgcctgttgaccaaaaactacggtaagcgtttattgaatgcattacccatatttccgatagagcagccagccgtccctgaggttatagtaaaaactaaaacaaaacagacgcgtcgcaaacggcgttagcggtgcaatgtcgacgcggtgagacgctcagaggagcctgcaatggactacagcaagatcgttaaagaagtcgggcgcggaaaaaaccacgctcgcgacctggacgtggaaacggcccgcgcgctctactcgcggatgcttaacggcgaggtgcctgaccttgagctcggcggcattcttattgccctgcgcatcaagggcgaaggtgaagcggagatgaagggcttctatgaagcgatgcaggagcacaccattaagctgacgccgccggtcggcaagccgatgccgattgtgatccccagctataacggcgcgcgtaaacaggctaacctgacgccgctgctggccgtcctgctgcataagctcggcttcccggttatcgttcacggcgtgagccacgatcccacccgcgtgctgacggaaaccatttttgacctgatggggatcccggcaacgcttcacgcgggccaggcacaggcgcggttagatagtcaccagccggtttacgttccggtcggcgtattttgtccgccgctggaaaaacagctggcgatgcgctggcgcatgggcgtgcgtaacagcgcacacaccctggccaagctggcgacgccgtttgccgaagatgcggcgctgcgcctgtcgagcgtttcgcatcctgagtacgtcggtcgggtcgcgaaattttttgccgggatcggcggccgggcgctgctgatgcacggtaccgaaggcgaggtttacgctaacccgcagcgctgcccgcagattagcctgattgatgagaccggtacgcgggtggttaacgagcgtcaggatggcgctgctgcgcaggcagtcgctctgccggagtcaaaagatcccgaagttaccgcgcgctggatcgagcgctgtatggtcgggagcgaaccgctgccgtcatcgttgaaaattcagctggcctgctgtcttttggccaccggcgtggtcttgtctctggagcaggggctggcgaaggtggctgagagctggtaaccctatcgcaggatcgcaggcaaaaaaaagcccgtccagtggcatggacgggcaaggcaagggtattaaaggatcttacagggttaaaacagtggcattacagggtgttgctgttgctacagggataactgacgattatttatagataaccgcagtaccgctcagtttgttgttgctgttagcggaggtaatgctatagccggttgcaccagcggcctcggctttttcagccagtttagcttccagtccatccagcgtcgtcgcgccttcagcggaaaccacaccaattttgttcatgctctctgcctgagccgatgtcaccggctgagcggcgaacgcgccgaaagacagagcggaaagggcgatagcggcggcagcatatttgatgtttttcatagttaatctctcgcaggttgttctgtataggggacgatgttccgtcgatgtgataagtatcacggtttttagcgggagataaaatcgaaggaaattaacagtcttcatctaattttttgaacgactattaatttattgaatattaataaattattttagccggcggcggcgaaacaggtcggggcggcgaacggggggctggaagggcacattttgccacgccgtttgccaaaaaacgtgcgcgaaaagataacgcgatgtgcgtaatgaacggtaaatattggtcagcgaagctggctatccttggagcctctgcgattatatcctgaaaacgtattgttatgtaaatctttctcctgttggcattttacgcagtatttcacccccgccaccgcccgtcggcgcgcctcaggaatcggctccccacattcttcacaaaatttgttgctttcccccgatgacagttcgtttcgcgcccgagctatcgcgtcgttgatggtgctgtcgatctgttcctgcaccgcgtcatcattcgcccagcctgatgccatagttcacctcgctatctcgcctctctttagtatagagaatatgggggtaaaaaatgaccagacaaggctcagatctctgaccattcgcgcagcaggttatggtaaagattaagcagagacaggacttcgtcactttcgccgtggcggctttttaatttctgaatattgccatccagttcaaacagcatactgcggcgtttatcgtcgcggatcattgactgaacccacaagaacgaggagacgcgaacgcctgaggtcaccggagtgacgcagtgcaggctgcttgaaggatagagcaccaggtccccggcagggagcttaaccgaatgctgtccgtaggtatcgttcacgaccagctcaccgccttcgtagctctccggggggcttaaaaagagcgtggcggaaagatcggtgcgcatccagcctccctgcgcctggctgcgtaccgcgccgtcgacgtggaaaccataagtttcgctctgctgataacgattaaacagcgggctggaaatcgctttcggcagcgcggcggcaaaaaacagcgagctgcgattcagcgccgccagtacgttgccctgaagttcgccgtaaagattgctgtgggtatcaacctgctggttatttttgacctgggcgcccagatcgccggtcgtcacgcgcccgtcgacccattccgcctgctgcagctgagcgataaaatcgtccacttcctgagagctgagaacggcgggaatatgatacatcatcgttttatctccggagaaaacggggcgtagccgccccggggtggatcagaagtgcatattggcggtgagcacgaaggttcgcggttcgcccgggtgataacggtagccgctcttgttaatcgaggcgacatagtcggtatcaaacaggttgtagacgttcagctgcaggtcgagattacggttaatgcgatagccgactttggcatcagccacccagtagccttcggtataggaaggcgtgccgaccgcaccgtcgctgccgcgatgcatgctgccgacgtatcgcgcgccggcgccgacggcgatcgcatcggtggcctgatactggctccagagagtaaacgcatgctctggcgtatacggtagcgcgctggtgccatcctgggcggtattcgcgccttcacgaacgctggcgtgctgttgggtatagccgccaataacctgccagtcgggcgtgatattaccggccagagagatctcatagccttcaacgcgcttcttaccgtactgcgaatagctgccgtcgtcgttctgctcgacttcgttttcaatatcggtgcggaagagggcggcggtcagcagcaggcgcttatccatcagctcccacttggtgccgacttcgctggttttggccttctgcggtttaaagtcggttcggttggcgctgctgccggtgccgctttgcgcgagggtgaagttgctccctcccggcggctgctgggagacagcgtagttgacgtagaggttgccgttatcggtcaggtggtacagcgcgccggccttccagttaaccaggttaccgctggttgaggtatcgacggtggtgacgggggtatttttcgccaccccggtcgggcaggcgatggcaccgcgtccggtaccgccgcacaggctggcgctatcgtatttggtctggtagttatccagacggatcccgccgttaagttcgacgtcctgggttatctgcagcgtatcgaaagcatagacgccgaaggtatccgtctgtccgttagcgttggcgccgctgcggttcaggccgccgatggagatatcgctgttcggatgataaatattcaccgccggaggcgtgagcggatataccccgtagttggtctgggtttcgcgggtaaattccacaccggtgctgacgtcatgaccgatggccccggtatagaacgtcgacgtcaggttagtctggttggtcaggatcttgttgctaatgtctttggtattcgccaggcgcgaccaggtccaggtgccgacatcgttggggtttggctgagtgatgtttgacgcgccgcccatcaccgcagtcatcaggtaatcctgcttcacgcgagaccagcgggtggtgttgcgaatcgtcgtcgtgtcgctcaggtcgtgctcgaagcgcatcgtcacggtatcggttgtggaatcatcgtagtcggagtcggtgccgtagaagttgctggtggcgaccttgccggagtgattcagcgccgaggtgccggcgttgggagcggaatagcccggcagaccgatggtgggaatgccgccgtcgggcgtgttgtgctgggttacgtgcagatagttaagatacaggcggttttcggtgccgaggccaaatgcggccgatggcgcgacgccgtaacgctcgtttttcacgttgtcccggcccgcatcgtgggttttctcgcccatcagattcagacgcaccgcgctggtttcgccaatggcctcgttaatatccagggtgccgcgtcggaaccaggcgctgcccgcgctggcggaggcgtcgatgccggaatcgaggcgcggctgtttgctgatcatattgatcgagccggtcggcgcgctgcgtccgtagtcggagcctgaaggtcccttgatgacttcgatctgctcggtattaaaagtatcgcggctgacgctgccgatatcgcggatgccgtcgacgtaaatgctgttggaagtgtccgctccgcgcatgtaaatcgcgtcgccggtcgtcgagttgccgttttcgccggcaaagaaagcgccgacgccgggaacgtttttcagcgcgtcggtgaggttagtgacgccctggtccttcatcacctgctcagagaccacgctaaccgtccgcgttgtgtcggcaatcgggcgtgaaaatttaggatcggcggagcgggtcggcgcgtacagcgatggcgtctgcgcttcgaccaccagcgtttcgccgctatttttttcagtgctatccgcggcaagcagctggccggtcggagaaagactcaggcataagccggtgaagagagtgagcgagtgaaaactgctgaacggcaaattgttatttttttccatatcaataagtgacttataattttaattaggccataacgaccgcagacgaagcgttgcttcgccccgaccactgcaggtgattttttacaaaagcaatgagtttgataatgattgtgataatcattatcaaacatcaggcgaatttctatcactcatttataaaaaaataaatacatttatttacattggctgcattttttctacataaaggcgcaccgggcaggcgaggttgttgcgcgaaaatggcattcagctacccggcctggaaaacggcgctagtacaggccgggtgggagggttagcgggcgtccggacgaacgaggtcaaagcgcaggctttcatcaatgccataataggcgctggggcctccggcgcgcagaatcggctgggctttggcggtctggtaaattccgtcttccagcagcgattcatcgatatgcaccgccaccacttcgcccagcaccagccaggtgtcaaccgctcgtccttctgcggttgttaactggatgcattgtgaaaggcgacactcgaagtttaccgggctttcggcgacccgcggcgcgctgacgatgcggctgggagcggcagtcagcccggcgcggatgaattcatcttcattatggggaagggtggcggaggtttcgttcatcgcgaccgccagaggccgggtggccagattccagacgaactctttagtctcagcgatattctgtacgctatctttccagccgctgctggcaaaaccaataatcggcggccgatagttaaagcagttgaaaaaactgtacggcgcgaggttacgctggccgctgttatcaagggaggctatccagccgatggggcgcggcccgataatagcgttaagcgggtcgtgcggcagcccgtgtccgtgcgaaggttggtaaaaatacatacgacacccgtgacaaaaaaagagataaccagactcacttatttaccgcgccgccgtcaacgggtatcttacgcggctgttcaaaggagattgccatgaaagcccagaaaccggggttacacccgcgtaaccgtcaccaacaacgctacgacctgcccgcgctgtgccaggcccaccctgagctccagggctttatcacccttaacccggtgggtgagcagaccatcgactttgccaatccgctggcggtgaaggcgctgaataaagcgctgctggcgcacttctacgcggtgaaacactgggatattcccgacggctttctctgcccgccggtgccgggcagggcggactacatccatcatctcgccgatctgctggcgctggatagcgggacgatcccggccaacgccagcattctcgatattggcgttggcgcaaactgcatctatccgctcattggcgtgcacgagtacggctggcgttttaccggcagcgaagtgaacgccgacgcgttcgccagcgcccaggctatcgtcaacggcaatcccggcctgactcgccagatccgcctgcgtcgtcaaaaagacgccaaagcgattctgaccggcattattcataaaaatgagacctacgacgcgaccctgtgcaacccgccgttccatgattccgccgccagcgcgcaggcgggcggtgagcgtaaacgtcgcaacctgggactgggcgaggagagcgtgctgaactttggcggccagcagcaggagctgtggtgcgaagggggcgaggttgcgtttattacgcagatgattgcggagagccagcagtttggccgtcaggtgaagtggtttacctccctggtttctcgcggcgacaatttgccgccgctctaccgtgcgctgaccgacgtcggcgcggtgaaagtggtgaaaaaagagatggcccaggggaataagcagagccgctttatcgcctggacctttatggacgaagccaaacgtcgccgcgctttataacgtgggctcggcgggtgccggcggtcccgccggtgccggcatcggcagaacctggtaagtttgtaccggcgcccgcacgcccgcgaggtcaaaatgccttttcacctgagtgtcgagggcgaaccttaccgtccactgcttcaacggcagggtggtaaaggtgacgcgcagggtgaaggcggtattgcttaagcccaccaatccagcgaaagagggctcgccaatgatcagcccgcgaatctcttcctgcgccatcacttccgcgaccgcgtctttcagcgcctggttggccttatccagatcctcctgtcgatcaacgtcatagttggccaccaccgagccgatcccgcgcacgaagttggcgaaggtggttatcgaagaccacggaataatgtgataagcgccagtatcctggcgtacgccgacggagcgaatcgacatacgttctaccgtcccggttaacggcccgatggtcaccagatcgccggtattcatgccgttctcaaactggataaaaatcccggtaataatatctttaaccagggtttgcgcgccgaacgaaatcgccaggcccagcgcgccggcgccggccagcagcggggcaatgttcacgcccacttccgaaagcaggatcatgatagtaatggtgctaatgaccaccgccagcgcgttgcgaaacagcgtcagcagcgttcgggcgcgggcgctgggcagcgggcggccgtgaatatccgatgccagccggttctcaatcaggctggcgagcagcgtccagccaattgccgagaagaagaggatcagcgcgatacgaatcagcacatcgaccgctttttgcccgctgccgttatgcatccactgccaaaaatcgaacagcccccacgcgctgagcagcagcatgatcgccacgcagaccgtcaggatacgcgcggctttcagcgacgcggagatccagccgttcagccgtttttgcagttcgggatagttgcgctgggtttccggcgacagggtgatggttttcgcaatccagcgcgacagaataccggagaccagcgcggcggcgccgatgatggccaggctgcgcagcgtcgcgcccatcataaatttcaggctgttgccgggatcgaacagggagaagaaaaacagcacgataaaataggcgcaggccagccagtgccagatcagcgcaaaggcgcggataaacaggctaaagaaggccagcgagcggtcggcgagatggataagcccctgggtaatcaatttcttattgtgaaatatcaggtacagcgcccagagcgtaatgcacagcataatcaccacgttggccagcgctccgaactgtacgttgacctggttggagataatcggcaccgcgacgatgagcccgtagccaatcaggctgctcagcgcgctgagacgcaggttccagtatttcgccgcttcatcgctgaggttaaacgggcgtagctccgggatgcgggggcaaaaaataagccgcagaatggccttgaaaaattcaatcagcgcgaaggcgttgagaaacaggctttgttgaaaggcgatggtgggattgttaccgttcaggcggtcgcttaaaagctggcccacgaagagcgtgagcgccagcagaagcaggtcaaaaataaacgcgccggcgatggttgcaggtagctgaagccagttgctgcggtcgcggtttttatgccgtccccagtggcccattttgcgatacagcggcagggccgccaggcgtaccagccaccagaacgcaaagaccaggcccgccagcagcaggaaatgccaggcggcgttggtgaaagtctgagaattaaacggtttgtgcggagaaccggtgatgttgcgccacagttgggagaagcgcgaagagagctgctctccgtattcgcggctgatgtgagtgacgttctccagcaccgtggtctcgtcttttatttccggcggcgtcagcttcggcgtactgtccggcggcggcgtggcggcggctttccgcaactgctcgataagctcctgacgggcgtcggcgttttcaagcacgtcggccagcgcgccgtaggccgctttcttctgcgccacatcgggttcactgctgctggacgggtccgctgtggttgccggaacgccgggcagcgtcgcggcccatagcggagcggtgaagagtagggcaagcagtaacaaaatccgcggcacaggcacctccattgcatctcaaaccaataagtatagaagatgagatccgcagagcgaggttgggatgattctggaaagcggctctcccgcgaagggagagccggggggcatcaggctacgtgctgcaaaaactcgcgcaggcgagggctgggcgggttattcaccagcatctgcggatcgccatcttccgcaatacgccctttatcgataaaaatcaggcgcgacgccactttttcggcgaagccgatttcgtgggtaacgataaccatggtcatgccttcttcggccagatcctgcatcactttcagtacttcatgacgcagttcagggtcaagcgcggaagtcggctcatcaaacagcatcattttgggtttaaccgccagcgcccgggcaatggccacgcgctgctgctgtccgcctgaaagctcagaaggatagtggtgcgcacgttccgcgaggcccactttctccagcaggtctttcgccagtttttccgccgccgctttattggcgccgcgaacgcgcagcgggccgaacatcacgttttccagcgccgtcaggtgcgggaacagataaaactgctggaacaccatcccggcttcctggcgaatcagccgctcgtcaaccttcgggtcgttgaccttcagaccgtcgacgatcaaatcgccgctggtaatctcttcaagtttgttaatacagcgcagcagggtcgatttaccggaaccggacggcccgataatcaccacgacttcgccctggttgatcttcagatcgatatcatgcagcaccttggttgggccaaaatgcttggaaacgtttttaaattcaatcacaggattttcatccttctttcaagacgacgcagaacaaagctcagcaccagggtgatgatcaggtagataaccgcaacggcgctccagatctccagcgcgcggaagttaccggcaataatttcctgaccctgacgggtcagttcggccacgccgatgacgataaacagcgaggtatctttgatgctgataatccactggttgcccagcggcggcagcatacggcgcagcgccagcggcaggatcacgtagcggatagtttcgcgacgagaaaggcccagcgcgaggccggcttcccggaagcctttatggatcgacagcaccgcgccgcgggtgatttccgcaatataggcgccggagttgatcataatagtcaccaccgccgccgagaacgggtcgatgcgtaaatcgctaaacgccatcggcagggcgaagtagatgaacatgacctgcaccacaattggggtgccgcggatgatttcgataaagaccagcgcgatgtggttggcaatccagccgccgaaacagcgggcgaaaccggccaccagaccgattatcagaccgccgaccaggccgaggaccgaaatccacagcgtcattttggcgccttccagtaaaattgggatggcgggccagatggcactccagtcaaactgcataatgtgttcctgttaccgtgtcgaaaacagaggaaaaccccctgagaaaactattcaggcctgctgacgggtagcccggagagctccaggtctaccagaccacagcaggcctggaagagagtatcgctaattattatttgggttcagtaccgaaccattttttataaatttcgttgtaagtgccgttctcacgcagcgttttcagcgcgccgttcactttttcacgcagctcgtcgctgcctttcgggaaggcgataccgtagttttgtgcttccagcgagtcgcctaccgctttgaacttgccgttacccgcagttttgatgaagtaaaggatgtttggcgtatcgtgcagaaccgcatcagcgcgaccggtacccagttccatataggcgttatcgatgttcgggaactggcgcagatctttggttttgatattggctttcgcgtaatcaacggagccggtgccgcccttcacggcaaccactttaccgttcagatctttgacatctttaatatcgttattattcgcgttaaccatgaccagcaggccgcttttgtagtagccgtcagagaagtcgatcgcttttttacgttcgtcggtgatggtgatccccgccagcgcgagatcgatgtttttggtctgcagcgccggaatgataccgctgaagtccattggcttcagggtgtagtcaagcttcagctctttcgcaatagcagcccacaggtcaacgtcgaaaccgacatacttatcgccctgtttaaattcgaacggtacaaacgccgtgtcggtcgcgacaaccagtgttttatcagcggcgtgagaagaaaccgcaaaagccagggtcagtgcagccagtgaaactttaaatacagacttcatagcatttccttttatatccacgggacgatcccctgcgagaacgagttgccttatgaaaaaatcatgccacttttacaacctgttgttttataacaagcaggaaggcgcctgttgcacaattttgataacggataacgttaaatgcaccgatatggggcaccgttttggtgcgtcataaaggcatcgcataacaagagcatttttaacgcaaaccctgatgttaaaacaatctcggcgtaacgattgtgtgaggtgattattacaattgatttacttttgcgcgtattttgtacattctcatgcactgaagtggtgcgcggcggggaagtggaaagaaaaaaaagccgccagcgtggctgacggcagttggccttactcgatattggcttcgatgaaccacaggaatttatccaggtcgcgggaagcggcggtaaagatatcagcggtatcttcatctttggcttcatcgatggctttacgcacatcgttggcgacgatcgcatagcggtcggccagctctttcagatggtcctggacgctatggatatccagcgggtagcttttcagcgggcttttgctgttaatgacctgagttgtacccagcgctacgccaccaagctgtacggcacgttctgccatcgtatcaaggtggtcgacgagcgcagtgcggaagccgtccagcatctcatgaacggcaataaagtttgcaccgcgcatattccagtgagcctgtttggtaatcaaagacaggtcaatgaactggatcacctggcgattcagcagctcaacggtcgctttcttcgcgctatcagcgacgtcgttacgggtatagagcagattcgttgctttagttttaaccagttttgcggtactcatagtgtcatatcctcttgatatttgtactcgtcatacttcaaattcgaattattcggagcgtctcatcccaataacttgcggaattaagtatagcaacggatttgagctttgcagcggcggtagtctctatcggtctgatagcgcagggctgttagtcaggaaaaatagtttataaattaaggagatgattgattttctcgtcaatcagctccttttcactagctgatgtcgaccttttgtatcttcgtttcccgacgcatcgtcagcgtggatcccatcgaggcaagaataatcgcccccagcgccagcgtttgggtcgcggttagcgtttcgccaagaaacaccattccggaaagcgcggcgagagccggctccatgctcatcagggtgccaaaggtcttgctgggcatgcgggtcaaggcaaccatttccagagagtagggcagcgcggtcgataaaatggcgatccccagtcccggcagcagcagcccccactgaaagagcgtatcgctggcctggatcatccccatcgggacgaagaccaccgcagcgatcagcgaccccatagcgaccgttgcggggccatgctcttcgccggcgcgctggccggtcagaatgtagaccgcccagcaggcgccagcgccgagggccagcagcgcgccaatgggatcgatctgcgccacgctttgccccagcggcagcagaaaccagagcccgagcaccgccagcgccacccagacgaagtcgagggggcgacgggagccaaagagcgccaccgccagggggccggtaaactccagcgcgacggcgacgcctagcggaatgcgttgaatcgataaatagaacaggtagttcatcgcaccgagcgacaggccgtagaagagcagcggcaggcgctgctccggggcaaagcgcaggcgccagggtttgaagataaccaccaggatgaaggtgccgagcgcgaggcgcagggcggtaacgcctggcgcacccaccagcgggaagagtgacttggccagcgaggcgccactctggatcgaaatcatggcaattaaaataaccagtatcggcaaccatgccggtactttgcgggacgagccgggcatcctttctcctgtcaattttgtcaaatgcggtaaaggttccagtgtaaatgaattaccccgcgccggttgagctaatgttgaaaaaaaggggtgtaaaagcagtacaatagcgcggggttgaagataatttcaccagaagattaggaataatctggatacacgtctggcgctttatgagccttaataggagtatatttgtaaaaaaggtttgttttccagtttgttatagaaacgtagaaacctttagttacatgaaaaagtacgttagacaatgtaaagtgaaaagagtttcccaaaagtttttgttatatttaatgcttaggacttattagaaacacatttgaggtggttatgaataaaattgcacgtttttcagcactggccgttgttctggctgcatccgtaggtaccactgctttcgctgcgacttctaccgttaccggtggctacgcgcagagcgacatgcagggtgaagcgaacaaagcaggcggtttcaacctgaagtaccgctacgagcaagacaacaacccgctgggtgttatcggttctttcacctacaccgaaaaagatcgttctgagtctggcgtttacaaaaaaggtcagtactacggcatcaccgcaggtccggcttaccgtctgaatgactgggcgagcatctacggcgtagtgggtgttggttacggtaaattccaggacaacagctacccgaacaaatctgacatgagcgactacggtttctcttacggtgctggtctgcagttcaacccgatcgaaaacgttgctctggacttctcctacgagcagtctcgcattcgtaacgttgacgttggcacctggattgctggcgtaggttaccgcttctaatcactccggtgatataaaaaatccgcctcaaggggcggattttttttgcctgcggttcacgcgactctgttaattgatggtaaacgcgtcggtacccagatgggtatagtccactttctttagctggaagttagtgatgtagatggggccggccttctgttccgagataaaacgatagcgcgggacaatctcctgagcgctgatgccggtccactgtgaaaagaagctgaggaagtcgttggcggaccgccgcgctttaatgaccttatgcgctttatcatcgctggagatcaccataaaggggacctggaaattctgctggtacttatcgtcgtgcgccagatactgcacctctttcccgcgctctttaaaagccagaccgtgatcggaaaaataggtcatcgagaaggtttcgcccgagttttgtagctgagtataaagatcgctcagcagcgtatcggtttgcgtcatggtgtagagatagcaggaggtctctttcgactgaacaaaaaccgcgtatttccctttggtgcggtcacaggcctgcggatgcgaacccatcaaatgcaggacaatcagctgcggctgggtgcgacgggtggcaagcacctgcgcggtcaactttaatagctgctcatcctgagtgtttttattggcctcgaaatcgccgttcttgaggaactgaacttcgtccgcgcgtttggcgatgctggcaattgccgtatcgtattcgccaatttgcccctgattcgagaaccaccaggtctgaaaaccggcgcggttggcgagggtgacaaagttatcctgaaactgcggtttatcatcgaccacccggttgagggttaaaccgagcgatttctgcgttgaaccgctggcggcaacgtagtcattgaacagatagccttttaccgagctggcgaacggggtgttgtcccagtggccgccaaaggcgccgagcgcatcgcgacgcgcgctctcgccgatcaccaccacatacagatgatatttgggctttaccgccagtacgtgccagctgtctttcatattcgccagctgcgccattcgcgcctgctcatccagcacttcattattatttaccaccacatctttaacgaagcgtacggcggggtagccggtgtcgataaccttaaagacgccgccccaggcgaggttttgcaccggctggagaaagaaaatagcggtgcagaacagcagccccagcgtctccattttcccccatcgcgccgatgcgtccggcttgcgccgtacggcaatcacgccgagcgcaaagataaacacggccagcagatagttgtaccacgggaaaatggtcaggatctcggtggactcttcgatgtttgtggcatgcagcgccagcagcgtgttgaaattgggcgcgccgtaggcctggccgaaaggataatacatggcagccagcagcgaataggcgccgatcgccactttttgcgcgcgcggaaagctgcgccacagcagatgcagcacgcaggtaaaagcaacggtatagagcaggctaaagtcgtagcccagcgccaggttaataaacagcgattgtaaaaagtagaatcctgtccatgggttcagtaccagtccgcgggcgaccagcgtttctttcagcgtgacattcatagtaaacaatcaaaaaaagagccatgtgcgtcccctggcatcaaggggtaaaacctgctggacagtgcgtgaagagggtctctgcgagccgcagtagtggcagggctgacaaaagatagggcttgcaaatgtcaaggtcaactatccataacggattgttttgggagaaagcttacaaaacttgaaaaaaagttgctgaagcgctgagtaatcagccagtgtggcagggaaatatgacaaaaaaatgaagcggcgtaccgcgacgccgcattagttgttgggtttatcctgctggggcttgccgttgatcagatcgcacagcataccgacaagcattaaccgtactttaaaaggagaatgggtaaacacgtttaaacacctcttgaattcattcatctcgacctcctgtaacttcgtccttcactccttgaaggatgtgtgtattacatacagatatagcacaggctatattttatagctatggctaaaacgttaattttttgttctctgtgcgcgatccattacaatagggatccttttatatgatgcttgatgcgtcacaggaatgaggaagcacaatgaaccgtcgcgcaggtaagccaataacaaaaaaagtgacgcagctagtgaatgtcgaagaacacgttgaggggtttcgtcaggtgcgcgaggcgcatcgtcgggagctgattgatgactacgtggagctgatctccgatctgattatggaggtgggggaagcccgtcaggtggacatggccgcgcgtcttggggtgtcgcagccaacggttgcgaaaatgttaaaacgactggccagcgtcgggctgatcgaacagatcccatggcgggggatctttttaaccccggaaggtgagaagctggcgcatgaaagccgcgaacgccaccagatcgtcgagaactttttactggtgatcggcgttagcccggaaattgcgcgtcgcgacgccgaaggcatggagcaccacgtcagcgaagagacgctggcgatgtttaaacagtttaccctcaagcaggggtcaccgggagaatgaacctcgtctttgttcagtcgctaatccgcgaccgttttttgcatctgctgctgatcgtcggcgttgttttaagcttttttgttccgtttgcccctgcaggctggctacacgccattgactggcatacgattatcacccttagcgggctgatgctactgaccaaaggtattgaactgagcggctattttgacgtaataggtcgcaaaatggcgcgccgctttgtgaccgagcgccagctggccatctttatggtgctggcggccgcgctgctatccacctttttaactaacgacgtggcgctgttcatcgtcgtgccgctcacgctgactctgaaaaaatggtgcgccatcccgacaagccgtctcatcatttttgaagcgctggcggtgaacgccgggtcgttgttaacgcccatcggtaacccgcaaaacattcttctctgggggcgctcgggcctctcctttccggcctttatcggccagatgctgccgctggcggcagcgacgatgctcaccctgctggcgctgtgctggttctgtttccccgcgaagcgtctcgactatcagagtagcgacagggcgccctcctggcggccaaagctggtctggagctgcctggcgttctatggggtctttttgaccgccttagagctgaagcaggagctgtggggactggcgctgatcgcgctgggttttttgctgctggcgcgggcggtcattatccacgtcgactggacgctgctgctggtcttcatggcgatgtttattgacgttcacctgttgacccagctaccggctctccagcatgcgcttaacggcgtcggccagctctcggcaggcggattgtggctgacgtcgattggcctgtcgcagtttatcagcaacgtcccggcgaccattttgctgctcaattacgttccaccatcggtgctgctggcctgggcggtaaacgtcggcgggttcggcctgctgccaggctctctggcaaacctgattgcgctgcgcatggctggcgatcgccgtatctggtggcgtttccatatctactctctgcccatgctgctgtgggccgcgctggtggggtacggattgctgcagctctgattttcagagaattgggcaagaaacggacagaaacgccacattcgcgctctccttttccggggtataactttattcacgatggtgaatcaccctgattgaaggagagtcctatgcgttatcaaaaactgggccataccggcctttttgtctctgagctgtgcctcggcaccatgaccttcggcggcgaaggcggcctgtgggggaaagtggggcagctgcgccaggcggaggcagagcagctggtgggcagcgcgctggatgcgggcatcaacttcatcgacaccgctgacgtctattcagaagggcgctcggaagagattaccggccaggcgctgaagaatctgaaagtgccgcgtgaaaacgtcgtcgtggcgaccaaagtgtttggcgaaaccggcaccgcaggcgtgaactcgcgcggcagttcgcgctatcacatcatcggcagcgtgaaggagagcctgcgtcgcctgcagctcgatcatatcgatctctatcaactccatggcttcgatccggcaaccccgatcgaagagacgctgtatgcgctggataacctggtgcagcacgggcacgtccgctatatcggcgtgtcgaactgggcggcatggcagatagtcaaagcgctgggcatttccgaacgtctggggctggcgcgttttgcctcgttgcaggcttactacacccttgccggacgggatctggagcgcgagctggtgccgatgatgcagagcgaaggcctgggcctgatggtctggagcccgctggcgggagggctgctcagcggtaagtacgatcgcgatgggcactcggcaagcggcggccgccgtcaggagtttgatttcccgccggtgaataaagctcgggcttttgactgcattgatgtgatgcgcgagattgccgatgcgaagggcgtttcggtggcgcaaatcgcgctggcctggctgctgcatcagccgacggtaagcagcgtgattattggcgcaaagcgcgctgagcagctcgccgataacctcgcggcgaccagcattgccctggatgatgatgaactggcgcggcttgacgcggtcagcgcgctgccgcgagagtatccgggctggatgctggagcgccagggcgaataccgccgcgaccagctcgcctagcagtaacttcctctcttgcacgccggatcgtctgtttcgcgatccggttttttatccgttgcgctcacaaaacgcgatcctggactttgcctgacgggagaatttcgtttatatgactagtcatgaaattaatatgactagtcataggtgcgagcgatgaacagaacactaccggcagattttttatggggtaactcggtttccagtatgcaaaccgaaggggcgtggaatgagggcgggaaggggatgtcggtttacgatatccgccagccggcggaatttgcgtccgactggaaggtggcaaccgactcgtaccaccgctaccgggaagacttcgacctgatgcaggatttgggcatgaactgctaccgcttccagattgcctggagccgcgtttgcccggaaggcgacggtgagttcaatgaagaaggtatcgccttttatcaccagtttattgatgaactgcttgcccgcggcattgagccgatgatctgcctctatcacttcgatatgccgctgtcgctggctgaacgctacaacggttttaccgaccgtcgggtgatggaagcctttattcgttacgggcagaagatgatcgactgctttggcgacaaggtgaagtggtggctgacctttaatgaacagaatctctaccacatgccggacgcgtttctgatttcaggctatatgcgcggcgagaagaccctgcgggagctgtatcagatccagcaccacgtgatgatggcccacgtacacctgacgcagtatctgcaccaggcgaagccgcagtgcctgatgggcggcatgctggcccacgcgctggtctatccggcgacctgcaaaccgcgcgatatcctttgcgcccagcagctcgatgagtttttaaaccagaacctgctgcgcgccttcgccggagagggctacagcccggaggtcatgcacgttgtcgcccgtgaaggctttgaggatatctaccgcgcagaggatctggcgctgatggcgcaggttaaaatcgactatctggcctttagctactacgccagcaaggcgctggatagcgacccgatcccgccgggcacgccggtgaaccactacatgcagtttggcgataaaaagaatgactttctgcaggccaccgagtggggctggcagattgacccgctgggctttcgcaccatcattacccgctactacaacgactggcgtctgccggtattcccgattgaaaacggcatcggggtgattgagtcctgggacggcgaaaatccggtcgctgacgattaccgcatcgcctatcatcgcgaccatatcaacgccatgaaagaggcgatgtttgaggacggcgcgcgggtgattggctatctgggctgggggttaatcgatattctcagttcgcagggcgatatgcgcaagcgctacggggttgtctacgtgaaccgtgaaaaccacgaccttaaggaccttaagcgcgtcccgaagaaaagctatgcctggctgaagcgggccatccgcagtcacggcgaagagatgtagcggcgcctcgcgcgggcagatggtatattctgcccgccagccactatcagacacgtaaaaggatccgggaatgacggccaaatatctgagtatcgcgcgggaaatcaaaaaacgtattatcagccggcagtatcccgccagcgcgccgttacccgaccagttcgccttagcggcggagttcagcaccagcaggatgaccatccagcaggcgatgcgccagctgattgtcgaaggccttatctacacccgtaaggggcagggaaccttcgtgcgcaaaaacttcctccagctttcgcagtgggagctgcccggcagcgactattttggcgccaccaaaacctgggagcatgtaggggaagtgaccagccgggtgattcgcttcgagctgcgttttccgtcggaaaaagagcaaagctcgttgctgattgacgccgatgccccggtctatgatttcgtccgcctgcggctgctcaacgaggaacccgtgtcgctggacctcaccgtgatgcccgttgcgctggtgcccggactgaataaaacgcatctcgaaagctcggtatttcgctacgtgcaggagacgctggggctgaagatgatgggatcgtatcgggtggtgcgggcgatgaaaccgcaggcgctggacagggagcatctcaactgcgaagcgagcgacccggtgctggaggtggagcaggtgatctatctggaggacggtacgccgctggagtatgcccattgccactatcgctacgaccacggcggaattattctggtcaataacggataaaaaaatggcgggcaccgggcccgccactctgcgcgatgcgttttagttcagacgcaccggcataccggaacggttctggatcgcctgatcgaccacgctctggtctacgtcagtctggctggtaatcgcctgtactgatttggtcaggttgatcggcacgatttcgccgccctggaactgctcttccgtggtggacagcgggttgtgaacttcaatgaagcggctgccgtcaggctcggtagtggcttttaccggctcatcgataaactctacgcgggtgccgaccggcacgttttcaaacaggaatttgatatcgtcgttacgcagacgcacgcagccgtggctgacgcgcaggccgatgccgaagttagcgttggtaccgtgaatagcgtacaggcggccgatatacagcgcgtacaggcccatcgggttatcagggccggcaggaacaacggccggcagcggttcaccggctgcggcatattcagcgtgcattttggcggtaggcgtccaggtcggaccggcttttttacgctcaactttcgtcacccagttgatcggcgtgtctttgcctaactggccgatgccgatcggcagcacgatgacggtgttggtgcctttcggatagtagtagaggcgcatttccgcgctgttgatgacgataccttcatgcacggtgtccggcaggatcagctgctgcgggatattcagcacggtgccgcctttcggcaggaaggtgtccacgcccgggttggcttccagcatgttggataaacccatctggtattcagcggcgaaatattccagcggctgcttgttgccttccggaatggtgatcacctggttctggccaatcagacggctgccgtcggtgggcagagggtaggttacagcagaagctgtgttgcaaaagcccacgatggcgaaggctgccgcgaagagtgttgataatttcataatctttatgtcgtgggcgatgttaatgccgcacaggcctttgtcagtttaaacaggaagtcgatgggagcgcattatatgtgctttccggcaaacaggtaaatgagatgtgtacgaaatcacatttttttcctgtgaccctgagtgtagcccgtcaacgcgggctctgcagcctgaaaacgggaggggattacccctccagaagccgcgactggagcgcttctcgcgcctgcggcgtgagctgatactctttctccagccaggcatcgacgctggcgtagcgttcgtcgatttgcgaaagtgcggcggcaaggtaggactcatgcaccgtcatcatttccgccaggttctgccggccgcggggggtcagcgcattaccgagggactggagcatgaaatcttcgacctgcgtcagcatgccctgggtaagcagatattcctccatgaccgtatgacgatcgcagccgagggcgaacagcgtcaacgcgcagccaacgccggtgcggtcttttcccaccgcgcagtgctgcagcagcgcgccgtcgaaaggctccatcagccaaccggccagctggcgataagcggcgttattgaacggcagctggcggtagagcgccagcataaactgctcgccgttaagggcgttcagggtggcggcgttgagctcggtgactttggcgttgacgtcgcgaacgtgcggattcgccggggcgttgaggtagtgagccgcttcgttcagcttatcggggctgcgattcacttcgcccgggtcgcgataatcaatcacccggctaagcgggatcgcgtccagatgggtgaggtcatctgccgtcatcatatgcagcgagccggagcggaataacttcccggtacgcacgcgacggccgtcggcggtacgctggccgcccaggtcacgaaagttgataccgccctgcagcgataagaaagccggatggcgggagtgtgtggtcataggttccttccagattaaggtaaaaaattacgcattaagcagtgtaaccgcgcaatatgacatgaccctaacacaggcgtcattgatgattttataacgccccgtgaaaagtgaagcatttgctggcataatgtctggttcatcacacttctcattctctattttcaggataaccccgtgctagtatccagcaacgtcaccatgcagttcggcagtaagccgctgttcgaaaatatttccgtcaaatttggcggcggcaaccgttacggcctgattggcgctaacggtagcggcaaatccacctttatgaagatcctcggcggcgatcttgagccgacgctgggcaacgtctccctcgatccgaacgagcgtatcggtaagctgcgtcaggatcagtttgcgtttgaagagttcagcgtgctggatacggtcattatgggccacggcgagctgtgggaagtgaagcaggagcgcgatcgcatctactccctggcggagatgagcgaagaagatggctacaaagtggctgacctggaagtgctgtacggcgagatggacggctactccgctgaagcgcgcgccggcgaactgctgctcggcgtcggcatcccggttgaacagcattacggcccgatgagcgaagtcgctcccggctggaagctgcgcgtgctgctggcgcaggcgctgttctctaacccggacattctgctgcttgatgaaccgacgaacaacctggacatcgacaccatccgctggctggagcagaccctcaacgatcgcgacagcaccatgatcatcatttcgcacgaccgtcacttcctgaatatggtctgtacccacatggcggatctggattacggcgagctgcgcgtttacccgggcaactacgatgagtacatgaccgcggcgacccaggcgcgcgaacgtctgctggcggacaacgccaagaaaaaagcgcagattgccgacctgcaatcattcgtcagccgctttagcgccaacgcctctaaatctcgccaggcgacctcgcgcgcccgtcagattgacaaaattaagctggacgaagtgaaagcgtccagccgtcagaacccgttcattcgctttgagcaggataagaagctgttccgtaacgccctggaagtggaagcgctggcgaaaggctttgataacggcccgctgtttaaaaacgtcaatctgctgctggaagtgggggagaagcttgccattctgggcgccaacggcgtgggtaaatccacgatgctgaaaaccctggtcggcgatctgacgcccgataacggtaccgttaaatggtctgagaacgcgcagattggctactacgcgcaggatcatgaatatgaatttgaaaacgatctgacggtattcgagtggatgagccagtggaagcaggaaagcgatgatgagcaggcggtgcgcagcatcctgggtcgtctgctgttcagccaggacgatatcaagaagccggcgaaagtgctctccggtggcgaaaaaggccgcatgctgttcggtaagctgatgatgcaaaaaccgaatatcctggtgatggatgaaccgaccaaccacctggatatggaatcgatcgaatcgctgaacatggcgctggagatgtatcagggcaccctgatctttgtttcccacgaccgtgagtttgtgagctcgctggcgacccgagtgattgaaattacgccggagcgcgttgtggacttcaccggtaactacgaagattatctgcgcagcaaaggtatcgaataatattcctgttgtctgtcccggattgcggcgctgctgcgccttatccgggctaccggcctgaagtcggcggtgaacctgtagcccgggcaaggcgcgttaagcgccgcccccgggagcagaggctgcgtggctgaattccccggaggcgatgctgcgcatctgtccgggctaccggcccgcagacggcgatgaatctgtagcccgggcaaggcgcgttaagcgccgcccccgggagcagaggctgcgtggctgaatttcccggaggcgatgctgcgcatctgtccgggctactggcccacagacggcggtgaacctgtagtccgggcaaggcgcgttaagcgccgcccccgggagcagaacgcaacgtggctgaattccccggaggcgatgctgcgcatctgtccgggctactggcccacagacggcgatgaatctgtagcccgggcaaggcgcgttaagcgccgcccccgggagcagaggctgcgtggctgaatttcccggaggcgatgctgcgcatctgtccgggctactggcccacagacggcggtgaacctgtagcccgggcaaggcgcgttaagcgccgcccccgggagcagaacgcaacgtggctgaactccccggaggcgatgctgcgcatctgtctggctaccggcccacagacggcggtgaacctgtagcccgggcaaggcgcgttagcgccgcccccgggagcagcgcacagcgtggcttaattccccggtggcagcgcgaaaaaggtgagggctacactcgccactcgctcctttcttcaccgttcaccagcagcctgcgtttttcccccgccggcaacgacaccttcagcgctttccacgccggacgataatcgccgcgcgcgttcacctgcaggttgatgctggcgctatcgcaaaccatttcccattctacccacagcgcatgaccattctggtagccccagctttcgccatcatcttcaaacagcaggccgcgacgggtccccacgcccttcagcgggaagagtttcagctcgcggcaatcgtctttttgcgcatcgacgtggcggatacgctcgctcagcggcaggcctgctccggcgcgaaccagcagcggcagtttttccagcggcgcatcaaggacgatccactggcctcccgcgaaccactggtggctatcaaagtcgtaccagccgtcctgattggccggcagccagacgcggcgctgacgcgcgccgggttcgacgacgctggcgaccagcagatcgcgacccagcaggaagtcgtcgcattcggcaaacgtctgcggatcgtgttcgtgatcgaggaaggtcggacgcagcatcggttcatcgtcggcgtgagcctgccacagcagcgtatagaggtacggcagcagacgatagcgcagctcaatggctgaacggatagccggcgtgacttccgggtacatccaggcttcgttgaccgtctggtcgtcattccacgagtgaatggtaaagcgcggatgcataacgccgttttgtacccagcgtacgaacagctccgggtccggtttatcgccagagaagccgccaacatcgtggccgacattgaacagcccggagaggctcattcccagccccatgcgggtgttatagcgcagcgtatcccagttggtacggttatcgccgctccaggtctggacgtagcgctgcatcccggcgcagccggagcgagagatcaggtacggtcgtttgtgcggcgcaaagcgctgctgagcctccagcgacgcgcgcatcatcagcagcggcatgaccgggcgaatatgtttaatggcaatttcctcgccaaacccgtaacagcgggcttcgccgtcccagacttcatactcgttattatcgttccacgtggagtcgatacccatctccagcagctgggttgtcacgccttcctgccaccaggcgacggtctgcgggttggtaaagtcaaggtgcgacccttcgtcatcccagaagctggagcgctcgggagcatccgcctgtgaatcgcggataaaaagcccgcgctccgcgacctcgttatagcgcggatggtcctgcagcaggcagggcttaatattggcggcgagcttcagtccggcatcgtggaaggcctggctcatcaccttcggctgcggcaccttatcgttgttccagttaaagacgtagcgcttgccgtcaatcgaggtatagccggaagagagctggaacgaatcgcacggaatggcgtgttcatcacacaggcggatgaagttcatcagctggttttgcgcatccggcgcgtcggtgtagtgcatcgtcgaaccgctgtagccgagactccatttcggtccgaagagcgttttgccggtcaggcgtacgaatgctttggtgatatccagtacccgtttgccggaaaaaagatagtaatcgatgtcgccggcttccgcctgccagcggcgataggcggtatggtaattatcgatttcgttgccgagatccagccagcagctgctcaggttgtcgtaaaacagaccgtagctgacatcgctacgctgcgcgatggtaaacggaatatgtttgtacagcgggtcggtgctcgccgcgttatagcccatggcgtcgaggttacgcatctcatagcgcttcccgtttcgctgcagatcgccggctttttcgcccagaccgtagaagcgttcgtctttgcgtcggctcaggtagtgggcaacgccgtcgccgtgcgcattcgccaggtaggcgctggtggggcggtcgttaaccagcggctgccactcgccgccctcatcgcgatagctccattccagccacagcggctggtggacggtgacgcgcagctgatcggtggcgatgctcagggtatcgctatgctccgtgagcttccaggcggggaggctaaagccgctcaaatcttcgcgcgggcgtccttcccacggcacgtcctgctggggagcgatactccaggtgcgatccagcgccagctgcccgtgccgctttagcagcacgcggaacatattctcttccagcacgtacagacacagggtgtgctggccgtctacgatcagctcaacgtggtggtccagccgttggtgcaaagtccagtttttcaaagtcttcattttttacatccactctcaggcgcgttttgcgcgacgttcagcaataaatgccaccaggaataccgcgccaatcaggtcaaagaaccccatggcgataaatagcgggttgaagccgattttgtcggcggtgacgccaatcagcagcgagaacagaaagctggcgatccaggcggcggagccgcgcatcccgttcacggtcgccatctgtcctttatcgaacgactccaccaccagcgcgctgagcatgcaggagatgatctggtggccgaagccgcctatcgaaatcagcacgatggtgatatagggatcgcgggtgatcgccacggtggcgagcgaaatcatcaggaaggcgccggtgacggagctggcgaccaccgagttcacccgcgaacagccgaaccagcgggtatacagtttggtcagatagccgctggcgacgctgccgaggtcggccgccagaaacggcagccaggcaaacatggcgatttgttttaaatccatgccgtgctctttcgccaggtagagcggtacccagaagctcagcaccgcccaggcgggctcagccataaaggccggaatggcgataccgtagaagcgcttgtttttcgatacggttttcagcgcggtaaagaagggcagtttgaccggcggcgcttcattgtcctgctggatcagcgccagctcagctttaccgaggttagggtgtttttccgggttatgatagaacgcccaccacagcacgacccacagcagcgccagcgcgccggtgaacatgaatgccccctgccagccgaacgaagcgtgtgcgaagtagataatcggcggcgccagcatggcgcccacggagaagccgacgcccgcccagcctgccgcgatcggccgctcggattttggaaaccactcacccagcgttttggcgttggctggcgtcgccgccgcctcagcgccgcccatgaaaaagcgcagaatcgccaggtgcagccagctccccgccccggcatgggcgatgcaggcgatggcccacagggtggcgcagatcataaagccgagcttgaggccaataacgtcgataagccagccgcagagcggctggaaaatggtgtacgccagctgaaaagcgccgactatccatgagtactgttcagtggtaatacccagggaggtttttaattccggggcgataatccccaacgaattacgcgtgatgtagttaacggtgacgccgagtaaaaacagcaccagcatccaccagcgcaggttcttcactatgcggcgcgatttactgaccgccatatcattattgaggccttggctcatagaactctccacgagacatgtagtagggaaaattgaccaacccgcttgctgagttgtcgctaaaattttctatttcgttgtttgttaaggttgatgtctcgacactattggttgactaatctcaaaggtgttggaccaattcaggctaagggagaatgcgagcgggcaatagcgacaattctgcaaatattttcatgggacgatccagatcgcagtatgacatcgccaaatcgcttaaaaatattcacattctcaatatgaaaattttttcatgagcaaagtagagcgcgatcacaaaatggacaaaaagctgaaagtgagcgaaatcgcggcgcgtaccgggctgtcggtgagcacggtatcgcgggtgctggcgggaaaagcaaataccagcgccagggctcgccagagggtactggattgcgcccgcgagctgggcgtgatggagggtatcgccgccgggcgaatgctgctcaataatctggtggtctttgcccctcagcgcgctttcgatgaacgcacggatatttactactatcgggtgattcaaagcatcaatagcgcccttatgccgcatgaggtacacctgcgctattgcgcgctggaagagaacgacagcgatgccaatttgtttttgcagcgcatgcatgaagcatcgacccaggccgcgattttactgggtatcgacgatccgcatattcacgatctggcggccgatctggcgaagccctgcgtgatgattaactgccacgacgcgggaatgcgtttaccctccgtcgcgccggatcatcggctgatcggccagttcgccgcccggtatctgtttgagatggggcatcaggcgatcatgaacgtgatgtgcctgcgccgctataccatggagctgcgtctgctgggcattaagcaggcgtggcgggcgcgtaatctccgtttcgttgacggcagggatttactcgctgtggccaacttcagcgccagggataccgaggaaaaagtcggggagtggctggatcagcgcggcgatggcccgctgccgacggcatttctggtgggcggtgattttatggcggcaggcacgatcgccgcattacaaaaacgcggtttgcgcgtcccgcaggatgtttccgtcatgagcatcgacggctttaacctggcggcgatccaggatgtaccgctaaccgccgtccacgtcccacgcgatgaattaggggtcgaagcggtacatttattacagcagagactgatccgtcccgatgcgccgcacggcgcgttactcctgcatgggacgctggcggtacgcgattcggtgcggcggatacgcgccggtaaccgccgtaccgccgttgaagcgaaggggctatatgatgattaattcgccatccccaacgcgcgcttaccgtggatatttaagtcatccagcgtaaagcggccttcccagtcgctttcataatcctcgcgggggaaatctcccggcgaagcgccgcgcgccagcgccgctttgaccttctgcgcgtaggcgaggtttttctcgcacattggcgcggcgggaatatacatcacgttgccccagccctgctgattttccaccggcgcgaccgagtggatcacgtcgcagtgccaccataccgaatcgcccgcattcagcgccggaatagagcttaaggctttgatcagcagcgggtgccatttttccgaaatcggcagcaccttgcccggcgcgacgccgcacagctcatcttccgggacatcgtcgagcagcggacgtagcagcacgtaagccatcgcttccgggatcggcaccacgtgcagcaggccctgatcggggatcatatcggagagcgcggtccacccctggaaggtgcggaacaccgagcatttggtggtgttgtcgaccgtatactcttcgacttcggtgcggtgcgccgcgtcccacgggtcgtaagcatcaatgttgccgttaaacacgtcggcaaacactttctgataggccggcagcagccagcgctccagggcgccggaatcggtatgcgcccccagtcctttcgaggtggttcccggcgggcggcggcgaatgcggtccgggtaaatgacgctgacgtccgggtcgaaccactgcttgccgtcgcggttaaacgtccacagacggttgaggaacgactgcacggcggccatttcatcgctctgtcgcgcctgcatctgcgcctgggaccagtaaatcggatagatttccgggcgcgaagcttccagcgatccgaaaaaggtatcgccgggacctttataaacgtcatcgaaatggttgcggtcgagatactcgagcattgcgttgtcccacgccagcgcctgttcgcgagaaaaatggcccttgataacggcgcagccgcgacgcttgatgagctcgcgctgggcttccgtgacctggccccgggcaatatcggcgaacgggatcgtcggccagacgtcctgaccgctggccttaagggagtcaatctcttccagacgcgcggcgatacgcgccgtcagccgatcgaacaccgcctgcacgtcgccaatttgcgcccgcagctcctgtttaatccggcggatggccgctttggggtcggcgggtaaagtttcacaggtatgggtaacagccataatgacctctcatctttcattcgaaagtaatttatcttacatatgataatttaagttaaaattaagttaatgcaagtttaaaattatgcggaggtgcacaaaacgggaagccggggcggtaaaccccgggtgtggcgttactcgttgaacggggcggtgtggtcgaggacggcctgaatgacgttcagcgcgccgtcgtggttgttatcatcggtggcaaaacgcgacaccgccttgatgctttcggcggcgttggccatcgcgaaagagtatttcaccagcttgagcatttccgtatcgttagcgctgtcgccaatggctacgcaggcctgcggcgagatgttccagcgcttaagcaagcggcttataccgttggctttatgcaggccggggataatcaaatcgacgaagccaaagccgctggtgaccggcttcatgatgccgtccagcgagacgtgcagtttgtcgataagctgcgggatttcgctatccggcaggttaagggaaaacttaaacagcgtgtcgtcgatgtcatgatagcggctaatgcgctgcaggcgatggtagtgctttgacatcagggtgacgaacgcctcgggcgcgcgctcgctgacgtaagcgctctcgaggccgcaggcgacgaagttgagctgcgggtctttcagcagttcaccgatgacgacctgggattcatgacgggtgagttcgccgtggaacagctgttgaccgcgttcgtaaaccagcgcgccgttctcggcaacaaaggagatttgatcacggatttccgggaaaaaagagatcagctggtagtactggttgccgctggcgaccacgaactcaataccctgctgctggagttgcgcaaactgcgcgagaaaacgcgagcggtcatactgcttggcgtcattgagaaaagttccgtccatatcggtgacgataactttaacggtcataacacatgctcctggcttaacttcgaccagtaacattctaattacaatgtgatggggagcacaaatttatttcgaatgaaagtttgcgttcacctctgtgcagcagaaaaccccggattgcggtgtaaacgccttacccgggctaccggcccgcaaacggcttcgaacctgtagcccggctaagcgtagcgcaagccgggggatgtgacttacagcgtatgctcggtacgggcgataatatcgtcctgtgcatccggcgacagggcggtaaagaacgccgagtatccggccacccggaccactaaatcacgatactggtctgggtgtttcttcgcttccagcagcgtctcgcgcgacacgatgttgtactgaatatgccagcctttatgcacctcgaagaaagtgcgcagcagcaccatcagtttctgcttatcggattcgttctccagcgtggccgggttcagcttctggttaagcagtacgccgccgaggattgagccggtcggcagtttgcccaccgagctgattaccgcggtcggcccgagatggtcggtgccggaggccgggctggccccttccgccagcggcgagtgcgctttacggccatccggcgtcgccatcgtttgggcgccaaacggcacgttggcggagatggacgaggtgccggcgtagtagttgccgccgatcgggccgcgaccgtagcgcgggttatgatacagcttcagctcgtcgatataggtctggtaggcgcgagccagcagcatatccacgctgtcttcatcgttgccgtatttcggcgcgccgttgattaagcgctggcgcagctgctcgtgggtcaggccttcgaagtcttcagccagcgcctttgccagctcctgctgaccaataacgccctgatcgaacaccagcttcttcaccgccgccaggctgttgccgaggttagcgatgccgacctgcagaccggaaacccagtcatacttcgcgccgccctgcttgatgctcttcgcgcgctcgatgcagtcatcgaccagcgccgagcagagaatatcgtgcacgttctcttccagcatggtgtcgaccacgtactcaatctcgatagatttgcgcgtgtagtagcggatctgcgtatcccagtcggccagaacctgttcaaagttgtcgaagttgccttttgacagcgcatgttcctgcggcaggaaaacctggccgctggtggcgtcgcggccgccttccagggttgtcagcatgacgcgggcaaagttgataaagctcatcccggtgcagcgatagccccatttaccgccgacggcggtttcgatgcagccgatagcggcatagtcgtacgcgtcctgcggctcaatccccagcttgataaattccgggatgacgatttcatcgttgttgaacgccggcatgccgaagccgcagcggatcacctgcacgcaggcgtcgaggaagtcgttgctcatgcccgcgtgatagcgcacgctgaggttaggttgagtcgaacgcagccgaccgcaggattccaggatggcgtaggagagcgggttcaccgcgtcctgcgcgttgccgtccaccagattctggccgccgatggtgacgttctggtacagcgggctaccggcggaagccttagagtgcgagccggagcgaattttgttcacttccagcagcttcagccagcagcagtgcagcagttcgatggcgtgttcgcgatccaatgattgtgccagctcaacgtcgcggcgatagtaagggtagagatactggtccatgcggccgaaagagaccgagtgaccgttggattcgatctgcagaatcagctggatgaaatagcacagctgcagcgcctgccagaaggttttcggcggctcgtgggcgataatatagcagttttcggctatcgccagcagctcgtcgcggcgggattcgcggctctccgtcgcggccatgctgcgcgccagcccggcatagcgcttacagtggtcgctgaccgcttccagcacgatatcaatggctttaaggaactgctcgccgtgcagatcttccagcacggtcaggttaatgcgcgaacggcgctcggcgactttcgcccgcatgccgtcgaggcctttttccagcagcagcggatagttaaccgcaaggtgagcgtcgccagaggtcatattgccttcggctttgataatgccggtcgccagcagcgctttttgctcgtcggtaaacatgccgtagcagcgatcctgtacggtttgaccgcgccaccacgggcacacttcgtggagcacgcgtttgttctcttcgctaacggcaaacccggcgccggggcgatcggcgaggtcgtcgatctctttttcgatccagctaacggtgtattccgggaagataggcgccgcgcgaacttcgctggcctggttgccgacgatcagttcatcgtgcttaatccagatcgtgcgttccgccaggtgatgagccagcgccagcgcgcggcgtaccgggatcggcttatccaggtgctgctgataggcttcggtatagtgcagggcgcgctcggtacaaaccggcggcttaacgatatgcaccagcgccattttatgcgcctgaatgcgcgggctcagagtatccagtttcaacgttgtcataaggttatcctcgtagagtcgccgttaaacctttgctctgagcatagcgctgcgcgaaggcgagcagctcgggtgcagcaagcggtttatccggagcggtatagggctgactgagtaattggtatttattcatgcctaaggtgtggtaaggcaggaagtggatctcgccaacctgtaaacggtcagcggcaaaatcggtaatggcggcaatatcgctttcgttggcgttaaagccctggatcagcggcacgcgaatgatgattttctttccggcctgcgcgacgcgctgcaggttatccagcacccggcgggcgctgccgtccgtccactgctgaaaaatcgcttcgttgacgtgcttgaggtcggcgagaaacaggtcgataaacggcaaagcgggctcgacgtatttccacggcacgtgcaggcaggtttcgaccgcggtgtggatccccgcgcggtggctggcctcaaacagctgtcgggccagttcgggattcataaacggctcgccgccggaaagcgtgacgccgccgccgctgcggtcgtaaaacggtttgtcgcgcagcaccgtagccataatctcttcgacgcttttctcttcgccgcacacggttaatgccgtggtcgggcagcagtcgcgcaatttgccgatatgcgcatcggtgagcttttcgcggtggataatcagaccgtccagcttgcgggtaatcacctccggcgcagcctgctggcagaggtcgcagccgtccaggcaaaggcgggcgtcatacagcaaatccgccgtgcgggcgcggctttccggattctggcaccagcggcagcccagcgaacaccctttgaggaagacaacagtgcggatccccgggccgtcatgggttgaataacgctgaatgttgaagatcatgattcaccctcttatttgcatatgaagattaaattactttcgaatgaaagttgtattgatataaatcaacaagcagaaagaggaaggagaatgaaggttaaaatgccgctgcgggtcacaaaacatccggcgacagcgccgccggaaaagggtcagggcgtaccgcacacctcgcagtgagggttacgcggcagcctcatttcacggaactggcagcgcatggcgtcgtacatgacgatttttcccgttgccgggctgccgtagcgggccagcagcttaatcgcttccatcgcctgcagcgaaccgatggtgccgaccagcggcgccatgacgccggcttcgacgcaggtgagggcgttttcgccaaacaggcggctcaggcagcggtagcagggttcatcttcctgatacgtaaagacgctgatttgcccttccatgcgaatcgccgcgccggagaccagcggcgttttatggcggaaacatccggcgttgagctggttacggatcgcgacgttgtcggtacagtcgagcaccagatcgtgggcggcgatttgctccgccagcgcctcgtcttccagccgcgcgttgagcgccgtgagctgaacgtggggattaatccgcgccagcgcggcgcgggcggagtcgaccttcggctggccgatggtgtcgtcgctgtgcagcgtctggcgctgaaggttggagagcgagacggtgtcgaaatcgagcagggttagcaggcccacgcctgccgccgccagatactgcgcggcggcgcagcccagcccaccgaggccgacgaccagcacgcgggaggctttcagctgctcctgaccgtcaaaatcgaaatcgcggagaataatctgccggttatagcgcagcatctccgcatcgctcagctccatgcccattacagccctccgaacagatgattaaacggctcgacttccacccattcgcccgcttccacgttgccgcgctcgcgttcgagaacgataaagcagttgccgaggctgaatgaactgaagatatgcgagccctggtgaccggtgctgctaaccaccagctcgccgtccggaccgcgctgcagcacgccgcgctgaaaatcgaggcggcccggcgatttcttcaggccggaggcggcgcgaacgcgcaggcgcatcggctgagcttgcccgacgttgccggacagcttcgccagcagcggctgaaccaattggtagaaggtcagcgttgcggaaaccgggttgccgggcaggccgcagaaccagctgtggttgagcttgccgaaagcgaaaggtttacccggcttaatcgccagcttccagaagccgatttcccccagctcttcgaggatcgctttggtgtagtccgcctcgccgacggaaacgccgccggagctaatcaccacgtcggcctgctggtcagcctgaataaaggcttcacgcagtttagccgggtcgtcgggaataatgccgaggttaatgacctcgcagcccagctcctgcagcatcaggtgcaccgccaggcggttggtatcgtaaatttgcccgtcggccagcggctggcccggcagctggagctcatcgccggtggagaagactgccacccgcactttacgtaccacctcaacctcggcaatccccagcgaggcgatgaccggcagctcggcggcggtcaggcgggtacctgcggggaagacgaccgcgccgtgggcgatgtcttcgccaagacgacgaatattctgcccgtttttcaccagggcgaggaagcggataccctcatcggtttgttcggcctgctcctgcatcaccaccgcgtcgcagccttccggcaccggcgcgccggtcataatgcggatacaggtgcccgcgggccagacgccgtcaaagggttgaccggcgaaggccttgccggccaccggcagcgctgcgccgtcggtgagatccgccaggcgcacggcgtagccgtccatcgccgagttatcaaaaccgggaacgttaagcggcgaaacgaggtcatgggcggtcacgcgcgaaaaggcctgcaacagcggtacggtatccgtcgcattcagcggcgtaatacgagtgagcatctgggtcagggctgtgtcgagcggcatcagtccggcggtaaaatccatgggtttctcctgcgggcaaacatcgaaaacgcctattatggcagaaaagagagacgggctataacccatctggcgacaagctttacatcaccgtccgctctttctatattcaaaaattgtataggacagtcagcacgataatgatatttatacactttatcgttaaggaatggcgcaatgggtaaggcggttatagcaattcacggcggggccggggcgattagccgcgcgcagatgacgccggcgcgcgagcgggagtacgtggcggcgctgtcggcgattgtcgatagtggacaaaaaatgctggctgccggggccagcgcgctggatacggtaaccgaagcggtccggctgctggaggagtgcccgttatttaacgccggtattggctccgtatttacccgcgatagccgccatgagctcgatgcctgcgtgatggatggttacagcttacaggcgggggccgtggccggggttcagcatttacgcaatccggtgctggcggcgcggctggtgctggagcaaagcccgcacgtgctgttgattggcgagggggcggaagcgtttgccgcttcccgcggtatggcgcgggtcgataacagcctgttttcgacttccgagcgtttgctgcagctgcgtcaggcgcaggagggcgacgatatcgtgctcgatcaccacgccgcgccgctggatgaacggcacaaaatgggcaccgtcggcgcggtcgcgatggatctggcgggcaacctcgcggcggcgacctccaccggcggcatgaccaataagctaccgggacgcgtcggcgacagcccgctgcccggggcgggctgctatgccaataacgccagcgtcgccgtttcctgtaccggtaccggcgaagtgtttatacgtacgctcgcggcctacgatatttcggcgctgatggagtatagccagctcagcctgcaggaggcctgcgaaagggtggtgatggagaaacttccggcgctgggcggcagcggcggcctgatcgccatcgacagagaaagcaacgtggcgctgccgtttaatagcgaaggcatgtaccgggcctggtgttatgcgggcgatacgcccacgattggtatttatcgcgaataagaggaaagggcgttgccgcatagtcaagaaatcgatgccgatgatgttctgcaggtgcgcggcctgaacgtcgtgttcaatcagcagcagcaggctttttccgccgtccgcgacctgtcgtttaccctgcggcgcggcgagacgctggcgattgtcggcgagtccggctccgggaagtcggtgacgtccctggcgctgatgcgcctgctcgaccaggcggtcagcgaagtgcgcagcgatgcgctgctgctgcgtcgtcgcagccggcaggtgattgagctgagcgaacagtctgaaaccgagatgcgcggcgtgcgcggcgcggatatggcgatgatcttccaggagccgatgacctcgctgaatccggtcttcaccatcggtgaacagattgccgaatctatccgcttacaccaggggctgaagcatgatgaggccctgcgcgaagcgaagaaaatgctcgatcaggtgcgcattccggaagcggaagccatgctctcgcgctatccgcatcagctttccggcgggatgcgtcagcgggtgatgatcgccatggcgctctcctgccgaccggctgtgctgattgccgatgaaccgaccaccgccctggacgtgactatccaggcgcagattttacagctgattgccgtcctgcaaaaagagatggcgatgggcgttatctttattacccacgatatgggcgtggtcgccgatatcgccgaccgcgtgctggtgatgtatcgcggcgaagcggtggaaaccggcagcgtggaggagattttccgcgccccgaagcacccgtatactcaggcgctgctggccgcggtgccgcggctgggggcaatgcgcggcacttcactgccgcgccgcttcccgctgttaaaccagagcccgtcgccggaggggcagaacaccgttgtgcccggggaaccgatcctgaaagttcgcgatctggtggcgcgcttcccgctgcgtagcggcattctcaaccgcattacccgcgaggtgcatgcggtcgaaaaggtcagctttgatttatggcccggcgaaaccctgagcctggtgggggagtccggctgcggtaaatcaacgaccggccgggcgctgctgcggctggtggaaactcagggcggcagcatcaccttcaacggccagcggattgatacgctgacgggcagtaagcttcaggcgctgcgccgcgatatccagtttatctttcaggacccctacgcctccctcgacccacggcaaacggtgggctattcgattatggaaccgctgcgcgtgcatcggctgctggagggcgatgccgctcgtgagcgggtcagctggctgctggaacgcgtcgggctggagccggagcatgcgtggcgctatccgcacgagttttccggcggccagcggcagcgcatctgtattgcccgcgcgctggcgctcaatccgaaagtagtgattgccgatgagtcggtatcggcgcttgatgtgtcgattcgcgcgcaaattatcaatctgatgctcgatctacagcgtgagatgggtatcgcatttctgtttatctcccatgacatggcggtggttgagcgcatcagccaccgcgtggcggtgatgtatcgcgggcgcattgtcgagatcggcccgcgccgcgccgtgtttgaaaacccgcagcacccctatacccgtaaactgatggccgccgttccggtggccgatcctgcgcatcgtcgtccgcagcgcgtgctgctctcagacgagctgccgggcaacatcttcaagcggggcgaagaggggatcagtacgccattacagcaggtgggaccggggcactttgttgccagagagcccgccgccgacgtgctggcgcgctaacaacgacaccaataatgcagcatttcaggagaacaacatgactcaacgcgtttcaggaaaatggctgttggcgctgggcgtcgcttcggcgctgacagcggctccggcctttgccgcaaaagatgtggtggtggcggtcggctctaactttacgaccctcgacccgtatgatgctaacgacacgctgtcgcaggccgtcgcgaagtcgttctatcaggggctgttcggccttgataaagagatgaaattgcaaaacgtgctggcggaaagctataccgtttccccggacggcctggtgtataccattaagctgcatccgggggtgaagttccaggacggaaccgagttcaatgccgaagcggttaaggcgaacctcgatcgcgccagcaatccggaaaatcatctcaagcgctataacctgtataaaaatatcgccagcaccgaggctgttgacccgacaacggtgaaaatcaccctcaaacaacctttctctgcgtttatcaatattctggcccacccggcgacggcgatgatttctccggcggcgctgaagaaatatggtaaagagattggtttccatccggttggcaccggcccgtaccagctcgacacctggaatcagaccgacttcgttaaagtgaagaagttcgccggttactggcagccggggctgccgaagctggactccatcacctggcgcccggtcgtggataacaatacccgcgcggcgatgctgcagaccggcgaagcgcagtttgcgttcccgatcccttacgagcaggcgccgctgctggcgaaaaacagcaagctggagctggtggccagcccgtcgatcatgcagcgctatatcagcatgaacgtgacgcagaagccgtttgataaccccaaagtgcgcgaggcgattaactacgccattaaccgtcaggcgctggtaaaagtcgcctttgcgggctatgccaccccggcgaccggcgtggtaccgccgtcaattgcctacgctgaaagctacagcgcctggccgtacgatccggcgaaggcccgcgagctgctgaaagaggcgggctatccgaatggatttagcaccacgctgtggtcgtcgcacaaccacagtacggcgcagaaagtgctgcagtttacccagcagcagctggcgcaggtgggcattaaggcgcagctgacggcgatggatgcgggccagcgcgcggcggaagtggaaggtaaagggcagaaagagagcggcgtacgcatgttctataccggctggtcggcgtcgaccggagaagcggactgggcgctgtcgccgctgttcgcgtcgcagaactggccgccgaccctgttcaatacggctttctatagcaatccccaggtggataaagacctcaacgacgcgctgaaaaccaccgatgcgcaggaaaaaacgcggctgtataaagacgcgcaggatactatctggaaagagtcgccgtgggtgccgctggtggtagagaaactggtctcggcgcacagtaaaaatctgaccggattctacatccagccggataccggatttagctttgaacaggcggatcttaagtagatagctgcgggtccccgggcgcaggctgcggggacttcgcgcaaggagaagcatgctcaattatgtgattaaacgcctgctggggctgatccccacgctgctgattgtggcggtgctggtgtttctgttcgtgcatatgctgcccggggacccggcgcggctgattgccgggccggaagccgatgctcaggtggtgggaatggtgcgccagcagctggggctggatcggccgctgcacgtgcagttctggcactatatcagcaatattgtgcagggggatttcggtacctcgatggcctcgcgtcgcccggtcagcagcgaaatcgccagccgtttcatgcccacgttctggttaacgctcgccagcatgagctgggcggtgatcttcggtatggcggcggggatcgtggcggcagtctggcgcaaccgctggccggatcgcctgggaatggcgctggcggtcaccggcatctcgttcccggcgttcgcgctcggcatgctgctgatgcaggtcttttccgttgagctgggctggctgccgacggtgggcgccgacagctggcgccactatattctgccttcgctgaccctgggcgcggcggtggcggcggtgatggcgcgctttacccgcgcctcgttcgtcgatgtcctgcatgaagattacatgcgtaccgcgcgggcgaaaggcgtgagcgaaacgctggtggtgctcaagcacggcctgcgcaatgcgatgattcctgtcgtcaccatgatgggcctgcagttcggttttttgctcggcggttcaatcgtggtggagaaggtctttaactggccaggcctcgggcgtctgctggtggactcggtggagatgcgcgactatccggtgattcaggcggaagtcctcctgttttcgctggagtttattcttattaatttagtggtggacgtgctgtatgccgccattaatccggctatcaggtacaagtaaggtgcgattgctcaactggagaagacaagcggctatcaacgcgatgccggggattaaacccgggcagatacgtaccccgtggcacgagttctggcggcggtttcgcggtcagccggtggcgatgggggcgggggtatttgttctgctgctgattgcggtggcgatcgtggcgccgtggattgcgccgttcgacgcggaaaactattttgattacgaccggctcaacgacggcccgtcaatgatgcactggttcggcgttgattcgctggggcgggatatctttagtcgggtgctggtcggcgcgcagatctcgctggccgccggggtactggcggtattcatcggcgcggctatcggcaccgtacttgggctactggccgggtattacgaaggctggtgggatcgcatcattatgcgtatctgcgacgtgctgttcgctttcccggggattttgctggcaattgcggtcgtggcggtaatggggagcgggatgtcgaacgtcatcatcgcggtggcgatcttttcgatcccggcctttgcgcgtctggtgcgcggcaataccctggtgcttaagcagcagacctttattgagtcggcgcgcagcatcggcgccagcgatgctaccatcctgtttaatcatatattgcccggaacggtatcatcgatagtggtctactttacgatgcgtatcggggtgtcgattatctccgctgccagcctgtcatttctggggcttggcgcgcagccgccgacgccggagtggggggcgatgctgaacgaggcgcgggcggatatggtgatggcgccgcacgtggcgctgttcccggcaatcgcgatttttctgacggtgctggcgtttaacctgctgggtgacggcctgcgcgatgcgctggatccgaggataaaagggtaggcgttcaaggattgtgcagcccggacaggtgtccgggaaagcactccgcacgttaatcctgtgcggttttgtcgcccggataaggcgcgcgagcgccttcatccgggataggttaagcggccggaattaaacccggctgccccacagatcgtattcgtcggcgtgttcgactttcacccgcacaacgtcgcccggtttgactttactctcaccgttcaggtagaccgcgccgtcgatttccggcgcatcggccatgctgcggccaattgccccttcttcatccacttcgtcgatcagcaccataatttcacgaccgactttctcctgcaggcgctcggcggagatctgctgctgcagctgcataaagcggttccagcgctcttctttcacctcttccggcacctgatccgccagttcgttggcggtcgcgccttccaccgggctgtacttgaagcagccgacgcggtcgaggcgggcttctttcaggaagtcgagcagcatctggaaatcgtcttccgtttcacccgggaagccgacgataaaggtcgagcgcagggtgagttccgggcagacttcgcgccactgcttgatgcgcgccagctggcggtcggcggagcccggacgcttcatcatcttgagaatacgcgggctggcgtgctgcagcggaatatcgaggtagggcagaattttgccttccgccatcagcgggatcacatcatcgacgtgcgggtacggatagacgtagtgcaggcgcacccagataccgagcttcgccagctcttcgcacaggctaaccatactggttttgaccggcataccgttgtggaaaccgctgcgatgtttgacgtcaacgccgtaggcggaggtgtcctgagagatcaccagcagctctttgacgccggcgtcggccaggcgtttggcttccgccagcacttcgccaatcggacggctgaccagatcgccgcgcattgacgggatgatgcagaaggtgcagcgatggttgcagccttcggaaatttttaagtaagcgtaatgacgcggcgtcagcttcacgccctgttccggcaccaggctgaggaacgggttgtgtttaggcttcggcgcgtagtggtggacgtgttccagcacctgttcatagctgtgcgggccggtaatttccagcaccttcggatgcacttcgcggatctgatcttcttttgcgcccaggcagccggtgacgatcactttgccgttttctttcaacgcttcgccaatcgcttccagcgactcctgcacggcgctatcgataaagccgcaggtgttaacgataaccatatcagcgttatcgtaggagggaaccacgtcatatccttcggtacgcagttcagtcaggatacgttctgagtccacgaggtttttcgggcagcccagagagacaaagccgatcttcggctgaggggtgacattgctcatagcttaaaaagtgttcaattattgggatggtcagggcagggattctacagagatcggcggaaagtttatactccttttcttgttagcctggcgatgtccgtgtttctttttatcgggatgattatccagattgttaatcaaaataagggagttattcatcttttatcttgcaacccggggaagtcggtttagagctggtttaacctgaagcggtaaaatagccgctgctttcagtctttatttttatcaggtttcccatgtttaaaaaattgggtggtttcgtctgcgcgctggccatgattggcgcgacgcccgtttatgccaacgagatggcgttatattcggtcaataccggttcctttgtttatcacatgaccggcaatcacggtcaatataacgaaaaattcaataaccaatttttttccgttgagcgcaagctgtcagcggattcaaagtacagcctgttggccggcactatgaagaatagctttgccgaccgctgcctctcgctaggggcgagaagagactggtacgcgggggcaagcggctggacgttcaagggcgtctatgcctataccggcgagtttttctttaaagcctttcgcgattgcggggactcaggcacctatcgaacggcgaagaaaatcaccggcgtcggtttctctccctatatttatcatggcctgcagtacaattttaccgattatttcggcgtggaaacgggcattatcgtcccggccatatttgtgatgagcgtgcagtggagcttccgctaattcgcccgaaagaggcttccgggcgaattttgattaatggctttgcgcaacgccagcgcctggcgcagcccccggcgcggtcggttctctattgtcgcgcagcgtaaataccgagatcagcgtaaacagcccggcgatgccgcccagaatataataggtatgcgcgaagccgatggtgtcgtacaaatacccggccagcggcgagtaaatcgcggtggcgatggaggcgacgaacagcaccagcaggtagaccgtcgaggagagcttgttgtcgaagttggcggcgataaatttaaacaccgacacaagaatcagcggtttttccagcgcatgcatcattttgaccgcgccgatccacaccgggcccagcggaatcgcggagccgacgatacgcaccgacatgattagtccggcgatgatcagcgcccatttcgcgccggtgcggttcacgaaccacggcatcaggcataaaaacagcgtctcgccgcatacctgaatggaggccaaaatgccgtaccagcgattgccttcttccggcgtcgggaactgcagagaaaagtactgggcaaactgctgatcgtaggtgtcgtagatttgcgtgacgaacagggtaaagatcagcagcatccagaactggccgttcttcgccagctccagggcatgcgaaactttcagcgcgctggttttctgcatttccgcttcggtcagctcgattttggtcagcataaaacagagcgcggcaatcacaatggcgatactcgccagccagaaggcgaggttcggattgctgtcgatatacttgccgacgatccacgcggcggcggcccagcctaacgatccccacattcttacccggccatattcgaactggtagcgccgcgaaattttatcaatatacgaatcaatcaccccgcagccggagttaaaaatcatccccaggtataccccgccaagcagcgcacccagccagaagctgtgcaccagcagcggcgcgtacaaataaataaagaacgggcctaccggtagcagcatggcgaccaggatccagatcagccgctttttcaggccgaacttatcggaaataaagccgaagaagggctgcatcagcagggcaataaaggcgttgaccgagtagagcaggccggttttcgttgcgctaatcccgaggtgctgagtcgtccagatcacaaagaacgccatggtcgaggaccaggcgaagagatagaggaaatcgaaaagactcaacaagatatagtttcttttgccgggcgtcatcatttcagttccttcaagcgatagagataaaggttacaaacaggatcgatatgcctgccgttcttattgaatgttatacgtaatacattttatttgatgatatgacacccggcggcattttctggcaacgtgaattgcgctaatttgtgatcattactgcaataaatgattttatatcccagggttggaatttttacttttatgagaacgtataacatttttggctttcaggagatgatgtcgcaggtggggattttaagcttcgttgtaacattgtaaaggatgttaatgccctgagaattattgatctgcctcatcgttttgtacaaaaaatgaccatattatgattgtggtaaaggacgtcagaggaggaaccgcgatgagcgttgacagactatatcgtaacctgatgaataagctgattaatgccaacattgatctcgatgcttatttacagctgcgtaaagcaaaaggctatatgtcagtcagcgaaaacgaccatctacgtgataacttgtttgaactgtgccatgaaatgcgtcaacacgcgccgcgcctgcagcacgtcgttgcgccggaggaaaaggatgccctgcggctggcgggcgaagccgtcgcttccgcggcggtgtgcctgctgagcggacatcatgactgcccgtcctacatcgctgtcgacgtagataagctggaaagctgcctggcggtattgcggctaaatattcataaattgaatgattctaagcccattactcatgcctgagatcggggggagcctgctccccccgattaatgttatgtaaaaatcccttcccgttttcccacgctggctacccttatcgcattgctgacaaaaggagtatgccatgcgccagaccattaccctgatgatagcccttaccgcactgttgctgcctgcggctgcccttgccgcccgggagcgcgtagaggtgctgcagaaccagcttgaacacccgtgggcgctggcctttcttccggacgatcggggcattctgatgaccttgcgcggcggtgagctccggctgtggcagcggggaaaaggcctcgcgcctgcgatctcgggcgtaccgcaggtctgggccaacgggcagggggggctgcttgacgtggcgctggccccggatttcgcccagtcgcgccgggtctggctaagctacgccgaaggcgggagtgacgacaaggccgggaccgccgtaggctacggccgactgagcgaggatctccagcgcctggaaaacttccaggtggttttccgccagcagccgaagctctcaaccggcaaccattttggcgggcggctggtgttcgacggccgcggttatttgtttatcggtctcggggagaataaccagcgttcgaccgctcaggatctcgataagctgcagggaaaagtggtgcggctaacggctgatggcaaggtcccggaggataatccttttgtcggccaggctggcgtcaggccggaaatctggtcttacggtattcgcaacccccaggggatggcgatgaacccgtggagcgatacgctgtggttaaatgaacacggcccgcgcggcggggatgagatcaacctggtgcaaaaagggaaaaactacggctggccgctggcgacgcacggcattaactatagcggcctgccgatcccggaggccaaaggcaaaacgctggagggaaccgaagcgccgctgtttgtctgggcgaagtcgccagcggtgagcggtatggcgttttacaacgcgccgaccttcccgcagtggcagcacaggctctttatcggcgcgctgaaggatacgtcgctgattgtcctcaaggttgacggcaataaggtgacggaacaggagcggattctgggcgatcgcggtaaacgtatccgcgatgtgcgcgttggacccgatggctatctgtatgtcttaaccgacgaatccaacggcgagctgctgagggtgagcccggcgggctaatatcaggtgaccgggatcatcaccacgttgcgccaggcctggcgctggttaatctgctgataccagcgctgcaggtgcgggcgcggttgccaggttttcacggtctccagcaggttataaatgaacggcgcgacggcgatatcgccgaggccgaaggcgtcgcctgatagccactgatggcgcgacagttcgtcatcgagaatggcgaacagggtctcgcaggtggcaataccggcttcaatcgcggcggggtcgcgtttatccggcggggttctcaccagccccattaaaatcggccgatgggccggcgagagcgaaccgttggcccagtccatccatttctctccctgagcgcgttcggcgggcgactccacccacaggcgattctgaccatactgcgcggccagatagcggataatggtgtttgattcccagagcacgatatcggtcgtctcatctttcaatagcggtaccagcccattgggattcatggccagataggccggatcgtgattcagaccgaactccaggcctgccagaatttgctgatacgggaggtcgagttcttccagcacccagcgcactttcttcacattggtcgagttatttctgccccacagcgtaatcatatccgctcctgctttttatttcgccgccgttgcggcgtagtgagcattcatgttggaataaagttaatattccggcaagtgattttattttgctgaaattaaacgctttttatacccactaccttgcgtttggggcacccttgggacagagcgttagaaaaactactattcagcatttccacctggttacggtccatctctccgatccacttcgagtaaatctcataaaccatctttgcattctcgtggcccatctgtcctgcgatgaaagacggattagctcctgcagttaaaagccagcatgcgaacgtgtggcgggactggtaagggcgtctgctcctgattcccgccttctttaatcccgcctcccaactataccccagagactgagagccataatacttcgtttccccgcgccagtttttgggcgggataaacacgaaccgcagtttttgttgttcagttaaaccatgttcgcggtgatggaaagtgatttcagttttgcttaatgcgccagttagcttgaattgttcgcgtagagcattcagcgcaggttcaagtagggttacagttctgatccccgcttcggttttgggaggcacaaacaggccctcattcgtctggttacgcctgacgtgaagctcacccttatcaaggtccacatcctcccaggctaaagctgttagctctccatgccgaaggccagtaaagatagctgtagtccagagcaaagcataccgaggagataacgtttttatgaaaccttcgtactcactctggagaagcggatccgggtctctcctggagcgcttaagcatctttataccttcgtgaggggtatgctcgataaagccgctcaggttcgccagtttgagcaacgcagtcaggttgttcatcaggccgttgacagtggatacagcgcgaccttttcttttaagccagggagcatgatcgctaaaggtgttaccagttaacagcgcgttcctgtaattcaacaggtcggtatgctgaatatccgcaatatgcgtattacttccgacgatagcgcaaagtgttgctatacgtgattctgcgcctctgtatgaggcagctgacacctcaagctttttggcatcaagataaactttgcataattcaccgaaggttttaattttttgtgtcgtggtgaattttttaagcgcctttgattcagggaagtgctctgcatagtcaaatttaccttgctgaatctcactcataattaaagcgcggagattgccagctttttttatattgctatttgatacagtccagccccgcaaaacttcgcggcaacgtatgccgcgatatagaaagctaatccttattcctttcccatgcagctctacgccagcaggcatattcattaagtttccccgacaagcctattaatcctggtgtagttgtagagaagtgtcgcccttccttctgaagcttttggatcgggtgggtgcttcttataatgaatgccctcgatccatcgtccctcccggtaagatttaatttgccggggagtcatatacatcttcgctacaattcccttttccatcacccattcatcttcttgagtaatatcggccataaataacctcatggccgggaaactataatcagctccccggtttaatgttgattattggaaatcattcagtttctacagtcgtatcatgctatttatgcgatagagcctttcacagccagaaacgtacccatcgctttatcaacaatcttcgcgttgtggtatttgctgattgcccaggtgatagcgaacagaatccagcggaagtggctggtatacgttttaaaggtcaggccgtcgcatatatcccatgcgctaaacctttcaggccaatcagcgtcataaacggcgttgtaagcctcaaagtcgttgttaaactcagcacgacataattcacgaacaatttctcgcacccttgctttatcgctatctggcgtatcgtcatcgtcgtcccagtcttcatcctcttcttgttctgagccttcctcaccctccaggtaatcactaagcgactctttcaggcttttgcaaaacgcttcgtggttgtactctttcgccagcatttcgcgcgccgaacagcccgcaccagcttccagcttttcagaccaataatgggtattgattccaccttcccaggcaccaaaaaagtcgaacatgtccgctattcgggaaaaggtccaggttcccatgtcacccgtcacagtcaaatagccaggccaggtaattacgtcatagtagtaattggacgttcccggctgctgcattcgaaggtggcgatacaggccattgtcacggatgatttccaggcggtgaaatgctgtatccatcaaaaatcgagagtcaatttcaaaaaagctcatgctgtaccttcctttacgaagattatccaatgggtcttatcgttctttccggtacgctggccgatcgctggtttttcgtcagtaaacgctagaatctggctaaccggtatctgggtttcattccatttaaagataagaacgccgtgtggccacaacacgcggaatgcctctttgaatccggcgcggatatcggcgcgccacgtttttttattcaggcgcccgtattttttccccatccaagcggtttgtccgacgcgctcaagatgtggcgggtcaaacacaacaaccggaaatgaggcatcagcgaacggcagcgcacggaagtcagcaacgaggtcaggacagataaccagacggcggccgtcgcacagcttgtgctcttcagctcgaatgtcggcaaataccgcgcgagtatctcgtttgttgaaccagaacatgcgggagccacagcacatgtcgagaatggttttctcaatcattccaggcctccagctcgttctgaatctcctcgtcgatttcgtcgttggtagcttcttcgtccaggtagtcacgcgcctctttcagatactgttcatggcgctcacgataccaggctgaaaattctggtgaccagccgttcagctcaccgtcatagtcaaccttagcgttacgttcagccatgctctcgaccatgctgtaagctgtggtaagcgccgcttcgcggatgtatccattgaggtcactctttcgccagaacggattcaccttagaatcgcagataggtttaaactccacttcccaccgtctgatgcagcgtgcgtttagtgatttgctcataccaccaccttatgcgcttccgcatcgaacttcctaccctgataccagccgcgacgcagccagcgacggatggtgcgcatagcctttgcatcaccacgtacgggctcagggaaacccccgtatttcacagttttaggcccatgcttgcgctctgactgcatcattccgcactcaatgatgtgatcgcggtagaaggccaaccactgcttgcgattacagacagggcaaggaatgtcaccaccattcgtcagcatgccatcttcgtatgcgtcgcaatcccacagatatccatcgcagcaaaggctatccgggtaatgcgcaccaaattcataaccttgatatccgcagctcatttgtcatcctccagtaccagttctgtgtcgtcaggaacctgaatcgtgagctcaacgctatagccgcgttcgtgctgggtgaaagatgtggaccatgctggaagtggcgtttcttctttaacctggcccacgccaatagcccagcagccttcgtctgtatagcaggcaataacgagcatctcaccttcagcggatttgaggtgataaacgcctggattactgtatatgcagatttcttccctgatagcgccttcgcattcgaaaaggtcatcactggcaccgtaaaatttaagttctttcatatttagtcctccggttatttattccacgctgctggtcgtaattgaaagcttgctggtcttgaaggtagtgttttgcgaactaaagactgtgttgcctttaattggtctttctttatttccctttcgttacaggtaggacagtaatatgccactttgcgataagcgcctcggccagaggggcgatactgcaactcttcgcgtgcaaaggagccgccgcagctgtagcagtggagtgtttcggtttccatatttattcctgtattaaggtgtgtggatacctgtcatttaaggcattaattcatttattcgataattaaaatgaaacttcggtgtttactttatattgacctgtaagcaagtcagcatcgacggaaattaaatctccgtacaggtcataatttaaaacaacatcacgaaattgaagtcctgaaagcgcatccgtacgaccacaaaacatatggtcttcttcgtgctttgctgcttcatgaatatcttttattgacgccatggcatcagaccacataccactgttaccaataaattgcgcaatagcgagtttgctttgagctgctttaaccatcgggttgctttgcagaaaattagccattaaacacccccgtaacatgcagaattttgataatggtcgctgcccaggcaacaaggcagatggccagaacaataaccagtgaacgaatgccatttctgctcatactccaccccagcactgaacgcttaccgatgcgaccgcaaataaaaatggaacaaccttcaaccagaaccggcgccatgctggtttgtcttcgtctcgaatcatctcctttccctcacgcgttttgagtacctaacaggccttgcaatgcagtgccgggtgcctcccggtgataccagccagttaacaactggtaccgacagcttcttttccaccccactcttttcagaaacgagtgttaccgcttaactgtgccgcatgcgcatagccgcattcactgcattgcaaggcctgttgtttgtgcctgtcttttaaccatttcaggctcaacggaatccgtgaatttttattgcgacttaagcttgtaacgcagagcaatagcttcttggcgggcgtcgccttcaatcttttgcagtagcttttccagattacgcagagcagtgtcgtaactgtccaactggtcatccataacgatgccgcagggtttcattgcctcgcgcatatcatccagtgatgaacggatttcattaacgctatggaaaatgtttacggatcgctcgataactatgttggcatttgagtagctaacggccagtttcaaagtctcttcagacatgagcattaccttattttgttgacccttatcgccgggtagcggaacgttttcttcttgccagtcactgcgcggtgattggtttgatggagtgaagttaagtcaactcaacaataaaatcaagccttgtttgttgattaaacttaacaatgatggcgtgagaaaataactaattgaataattagttattttttatttgttctcttgcgggctttgaggagttcttcgaagagggtattgaaattttcgactcttgctctgagggtttccaattgagctgattgctctgactctggtagggagcgatacaaatcaactaactctctttcatcgtcagagagtttatcttgctcgattaacgctaatgggtcgcctggggtctgatctgaatcgccgaacagaatccacgtgggtgtgcactgcaaggcgcgagacagagcgtgtaaatttttccccgtaggctcagtgttatcactttcccacagcgaaatcgtggcataggaaacccccgcagctttgcccaactctcgctgcgtcattttgatttcttttcggcgctgaagtatgcgctgacctaaagtcttctcgctcattgttgagttatcttaattcttcttgacttgagcatcctaagcaaattatcttgtttaaagttcttaacaagagagtggaaaaaatgctcaaacaggatgcaataaatttttttggttctaagacccggttagccagagctgcaggggttgaaagatccgcagtctcccagtggggtctcttggttccagaggggcgcgcacaaagattagtcgacgcctcatccggcaagctgacatacgacaaagatatttacgaccaatatcgtaacgaaaaacgttctggtgaggtgaatcatgaaaatcaggcatgagcgcattcgcgaggccatgaatgcctgggcgctttatccaggcggccgtaaaacgcctgtatcggcgattgtcgacgcttacttctccatgggtatgactgcaccagagttgtacgacgacagccaccctgacgcacttagccgcaatatccagaagatttaccgctgggttgaaagtgattcgcctgcatcaatcgaaaaaattgcgcagcttctccccgcgattgaacgtgctatgccgccgttactactggcgcgggtgcgtagttactactctgaaactttccgcgaacttcttcaccgcaaacaacgggtggacgacgaaatggaagcgctgttcggcgcaatgattgctatctctgaccggattgctgatggcggctcttccggtaacacgctgattcactaagcgaggttcaaccatgcgtaaccagtctgctgctgaattgattgctcgcctgaaacgagcgtatccggcgtatgagccgtctgaaagagattgtgcaggcactggcatccctaaggccggttctcgcttccagcacaggcacaaaggccacatggtgacggtactcacagcgacagagaaagaagtttcctaccgcaaagcctgcggggctattggctgggtaggattgagagagtttttacggctacacaatgaggtttcggaatgaacaatcaggtttttgaaattgttcaggccatgtcggggcaggggaactgcataacgatccccggaccgtatctggatttctttgcaggagacaggcaacagcatttgctggcggccattctcaatcagctggtgttctggtcgggcaagtcgagtctggaaaatggctggttttacaaagagcacgcagcgcttgccaaagagattcgcgccaaagatggcgacgtggtcagaaaagcaatgttcaagattacagagcagtacctggcgggggttattgaggaagagttacggcaggtaagcggcactccgaagaagcattatcgggtcgatcaggaggcgctaatcgccaaaatattcccgcaagggggaaattcaaataacccattgaaaaatatggatacggcccaagagccgaatggaaacggcttaagagccgaatcgaagcaagtgattgaaagtgatggaaacggctctcaagccgaatgcattcgtcccaagagccgaatggaaacggcccaagagccgaatcctggaaacggctctcaagccgaatcctatctctatacagatcttaaaaacagatcactacatacagatcataaaaaccacgcgggagagattcttcctgtggataactttgcagagtcaggacgtgaaccggtcatcccggaagcaaacattcctgacgctaccgaagacagtaacctggctaccgatgatgacttcgatctcgcgatgtggttctggtcgaccatcatcgagatgtacgaacgcgccgccgaatttgacggctctctggcaagaccgagagaaccgaactttgttggatgggctaacgaggttcgcatgcttcgccaggaacatggctgcagccacgaccaaatccgcaccatgattgagcgcattcagcgcgatcagttctggtgcccaaaagttcaaaccatgaagacattacgtaacaaatggcctgagctggcgctgaagctgtgcccggtaaaccttgctgtaggcggaaacctcggatttagcggcaaagttcaggcagatattccaaagggtttcaggggctaaggagttttttcaatgaaaacaactaaatccaagaaaacacaatacagcggtgaaatcacgatgatcgaatttctcaaggccaatcctgatttgaccaccagagaaatcgccgttgcactgggtcgcggtatgtcgtcggtcggtaatcagcttcgccagttacacggaacaggtcagattacccaaagcggcatgcggaatggcgcggcaatgtggtgctttaacgatatgccgtttggctgcgcgaaccggcttcgggcgaagtttgaaagccttctgagggagtgtcgcggggtcgctcaatgaaattacagaaatgccctgattgcggcgcgttacctgagtaccactggaaagattatatgtttggctcttgctccggcgcactgaaatgcccctttgaccattaccgagtccagcaaagctactgggctggtggaaagaacaaagccaggcatgctctggaacaaaaatgggctgaggcggttaataaaaacgaggttaaaaatggctaagaattcaatcgacgcatacggtgccagcggcaagacaaacgttctgatgtttgagccggaaaatctgcatattgtcactgacaaggctcatccgctttacgatgaacgtatttacttacctctcagtgaagccatggtgctgaacatcatagaccagggggttcttgagccgattattgtctggaaagacccggaaacggggctgtcctgcgtggttgatggccgtcagcgtgtccgccataccctggaagctaacgggcgtctggcaaaagagggaaaaaccccactgctggttccggcagtcactaaacgcggttcagctgtacgcatggctcaggcgatggtcagcgcaaacgaaatccgtcaggccgatacaccgctgggcagagccaaaaagatggctgatgcgctggagcgcgggcacgatgaggacgatttagcactgatgtttggcgtgagtgtccagacagtacgcgcaacgctgtcgctactggatgccacccaggcagttcgcgatgcagttgagtctggaattgtcaccgttagccaagcccgtcagctggcatcacttaaacctgaagagcagcgggagaaggtctctgaaatcgaagcggcaactgctggcacaaccggccatgaaaaagcgcgtcgtcagcgtcaggttctcggcgataagaaaccgcgccttaaaactcgcaaagaaatcactaaagccctcgaaggtgccagcggtgaatacgctgatgctctgcgctgggtactcggggaggctgtatgagcaacgacggattaacacttaaccaactggcagagcgcaacgcagtattggtcactgaggtcgagaaattacgtgctgagcgtgatcagctggctgcggagaatgtggcgctgaaggctggtcgcagttatttcatgtacagcgatgatgcagggtttgagacgcactcgactcgcgaagaggcaatcaaagcagctgaagagatgattgatgattatcgcggggatgctggcgatggatttccggaggaagcaggtacaacccgctggggcgtgattatccaacaggccactgagtgtgattacgaaaaaccgtcagctgaaaacgggtggatgggctcgtgcgattacagattgctgcctgaaacccccgccaccgatcgcatcgtagccgggattaaggctgatggggtggagctgttcgcggcagagcagcgaggcgtagcggagcgtttgaaaaaacgcggcggtgatgtggtgatgagcagtattaaattctgtttagaaagtgcagaagaggcagaagtgttcgcccagcagctgcgcgacggaggtaacggtgaatgagttggctcttttcgcaggcgctggcggaggaatactcggcggacacctccttggctggcgaacagtttgcgcagttgaacgtgatgcctacgccgcacaagttctcgcgcaacgacaaaacgatggaattctccagcctttcccgatttggtctgacgtgtgcagttttgacggaaaaccatggcgaggaattgttgacatcgtttctggcgggtttccgtgccaggacatcagtgctaacggcaatggagccggcatcaatggaaaacgctccggattatggtctgaaatggcgcgaatcgtcagtgaggtacgacctcaattcgtctgcgtggaaaattctccacgactcagaggaaaaggtcttgccgtggtcatcagtgaccttgccgaaatggggtatggctgccaatggtttcgtgtttcagcatccaactgcggagcgccccatgaaagagacaggatgtggattgtggccaactgccaaagcgtccattcgcggggactgtccgagcgagcgtttgcgcagaactccagatcttccaagtgcgataaaaatgcgcccacttccggatgggagtgcaccgccccaggatggtcagctgaacccggattgggtcgagtggttcatgggctggcccatcgggtggacagaattaaagcccttggcaatggacaggttccgcgagtggcagcaacagcattctctttgctgtgtgaaaaatgatgaacaggagcgtgcagcatgactgatatcaccgaactggcgcagagcatgaagcgtcgagcagcatcagcaaatgagtttggcgaaagcctgtacgtaaaagccgataatgttctcgctgtggtagaggcgctggagcttaaggaagagcagcgagcaaactggttccacatggcgcagaagttggggaataacttggatgcggctgaaaagcgcatcgctgagctggagcgcgaaccggcagcacgcatggtcgtaacccctactatctggaagcattatactgccgcccaaactgcgattatttacgagaaagccatgacagatgcaggcattaagtggagaagtattgatgaacgcttaacgcatgaagagttagaatcactatacttggcgatgaaatcacacttcgaggttatggctgaatccgcttcagaggctgaggttattgaatgcagccagatagtaagagcattgtgtgagttacaggaacgccgcaccgcaatgctcgcagtcgctccacaggaggtgaaatgatggactctttactggaagacacctgcaagcgtgtcattgagctggaaggtctgctgctggtggtcgttgtataaacccgctgttgcggtttttttctttctgttagcacgcttcggcaactttgtgccgccaccgttcgttgaggtactggtgatgggcaattttcctgagttatgtcagaaaagggacgcagccgcatgatgtattaaaaagctgagattgcaactgtatctgaaattgttgaattaaattcatgtggtgcgcttattaatatgtgctttagtttaaatgatttggaaacttctcaatttgaaaatagttgaatctttactccattaaagctgctattgtctcctgtaaaatggaaccatcaagtaccggagccttctgttacttgatttttaagtcttttacttagggatgactgaggatttatcatggcaaatgattcacgaggaaatgaggtggttttcaaccgcgcatatctaaacttgtgctctaagaataagaatttaagtacattggttatagccagagagtttaaggatgataatattgttggatgtttttcttttggccttaaaaaactaatcgatattgagtcaaagtgtttgtttttgcgctataagtacccatggccagattttgaaattgaactggttaaaaataaaggcggtgattacgagttcatgctttttcataatgattttcttaaaggtagtgaggtttaagttagttataacgatttttttaatcaaatcggatttaatttaattgtttatgttagacattttttaccttgagcttgtctaaggataacattcgaagagtgtcgcacgcttgcccgactactttaatcgaacagttttgatgtcactgctcgattaaatttggccattacgtaatcatataaggtctcgtcaatatgacttgttttaccactcatgagttgggcgatttttgtttactgtgacctaagactctgtctctctttagagaacatgactaaaaaactccatagattcaacccgctacggtgggttttgttttcccatgactgataaaaattaacgttttgtgctcttaagatattgctcattcagtaagttaggtgtactgtgtatttatacagttcttaggtgggtgatactatgagaatcgaagtaaccatcgacaagactaaaaaactgccagaaggggccattcccgcccttgaagttgaattgctgcgccgtcttcatcaaaactatgaaggctgcaaactaaatataagacgctcaagcactgatgggctgaccgttctgggcggcgttgatggcgataaaaagcgcatagagcaaatcctgcaggaaacgtgggaaagtgccgatgactggttttattgagctgtaagagagtggcagttatgccgccattgttaactttatacgccatcttagcgcggttattttttagcgtattaactcgttggccgtgttcgttgctggtggagtgtttccaatgaggtatttatggaaataccggatgatttatttccagggtttaaagagcatgccggacctgtccttgtttatgtaaaaaacggcgtggtggaaagaggcttcccgctccgtaaggatgagtttgtcacctcgctcagatcccttgatgaggcccgtaaaaaggctgggcttccccctgtaagtcaggactaaaattagctatattaattacgggtctgaacaacccttcttgccagtcgctgtgccacggagaaaaaccgatggcgcagaagaaccactctcaaaagctgtacctcctgacaccggctatcaaatatgctggtgtttccgtttgtctgtcgcactcaggtggtgcgatatgagagaccctcgtcgcagatgcaaagcacccggctgcggtgcctggtttaaccttacctattcgaatgtttactggtgttgcgaagagcataagagccagtaccttgcgcatcagcgcgagaaacaaaaggttaaggcacaaaacaggttaaaaaataaacccgttcaccatatccgccctgaaccaacgacggctgaaaaacctctcagccactggctggaagttacggagcgcgtggtaaataccctttgccgtgaaactgcccttgctaatggggaggggtgcatttcctgcggaacccaccaggccaaagtatggcatgccggccactacagaaccgttgctaaagcctcccacctgcggtttacccgcatcaatatcaatcttcaatgtgatgactgcaacgtcggcaagtccgggaatatcaaagcttaccgggtcgggctggtggaaaaaatcggtgaagccgcagttcaggggcttgataacgacaaccggattcaccgctggaccatcgaagagctggaagccctccgcctgcaggcttacgccgacttacgcgcactgaaaaaaacgctggaggccgcatgacttaccagcttatctacgtcgatccgccctggcagtatggtaataaaattagcaacggcgctgctgagaaccactatgaaactatgagtcttgtcgagcttaagcgcctccctgtctggaatctggctgctgataatgccgttcttgccatgtggtacaccggcacacataccgaggaagcgatcgagctggcagaagcctggggttttcgaattcgcaccatgaagggttttacatgggtaaagcttaaccagcacgccgaacggcgattcaataaggcgctaactgaaggtgagttggtggatttcaatgatctgctgtcgatgttgaatagcgaaacccgtatgaatggaggcaaccacacgcgggccaatactgaagatctgctaatagccacctgtggcgccgggttggaaagagcgagcgcatctatcaagcaggtggtttattcctgcctgggtgagcacagcgagaaaccctgggaggttcgccgtcggcttgaactgctttacggcgatgtcagtcgggtggagcttttcgcgcgcgaatcatggcctggctgggaccgctggggaaatcagtgcgagagttctgttgaaatgcattcgggaaaatttatcaccagggaggggatatgaatcatctcaccatagagagcatccgctaccgctggatgaagcttcgcctttgccgtcatcgcggcactgtattagttgactaccgcatcctcaaaaactttatacgcacctgtcagatccggggagagacagcatgaaccttgaaaatacagtgaaataccacttcgcaaaatccacgctgattagcgattctccgcgtgctaccgcctctgattcactgaccggcaccgatattatggcggcaatgggtatgacgcaggagcgcgctgcaatggggtacagcgcctttctcggaaagatgggtatcagcaataatgatcgggaaagagcgatcgatctgctggctgaatacgcattaacccggtgcgataaagtagctgcgctgcgcaaactcacaccaaacgtaaaaccccgggttatccggatactcgcagagttcgcctttgaagattactcccgcagcgcttccagtaaaaaaacatgtgactgctgccatggggctggattcatcaatgcagaggtgttcaccaacaaggtaacgtatccggacggcaaaccaccgaagtgggtcaaagttacgaaggggatttatccatcatactgggaggaggcgaagtctgttcgggagcaagttcgggtgctctgccaaaagtgccagggtaaaggaaccatcagtgctgcctgtaacgactgccacggacggggaaaggtagtgaatcaggatgagacggagaaacagggcgtgcctgtcatgggtaactgtaaacgctgtggcgggcgcggttatgagcgaattctctccactgctgtgcacaatgccatttgccagataactgacgccatcaccctggacacctggaagaagtcggttaagccgttcttcgacgtgctgatcactaaattcgatatagaggaggcctgggcagaggcgcagctcaaaaaaataacgcgctgagatatttacttttcccgaattcgtgttaaattgttctaacgatgggctttgtatgttcaccgttaaagaataaatttaagagcctcgcatattgcggggcttttgctttccggcgatacgacaggggtattcgcgagatgcattgcatcagtacccctgtcacatcgccgtatagcgacttaaaccaaccaagaaaggtaggttccatgattgttaatttaaggtaaaaagttaccgtgaagttacccggtcaacctcctgactagggcggaagttgtcagccagagatggagttaaaagtccgcaggccacggtatgacaagccaacggtcttccgaagcaattcggcttcacgaacattcacatttatttgtactaaacatactttcgcctgctcgctgcaggctttttttatggatgacctctttaatcatatggcatgagagtggtatttgactgcaaaacaatttgataataaattgttaatgtggtgaatccccctatgcggaggggcattgccagtctgatatgtttttttgcgcattgcgagtcgtctgtggactggcggcgacttaccgggaggcacccggcaccacacctaataaaaaatgatgatagctgtaaggcccacttcggtgggctttttctttgggcaaaaaaaagcccgcatggtttcatgcaggcaaggcagttacatttagattttgtcccggtatatgtttttttgtccggaagtcgaaagatactgtcttgactactttttgtaaataacggattcaaaccacaaggccatgcatttgcatggcttttttatttgtgccaccagagcatcattcactctgtgctttgtcgttaatccatctggcggccatcctaaaggactatctgctgagttcttttttcagaggttgcattttcttcagtacctcatctgaattagtgactgagaaacccgtcgggaaaaatagcattccatcggatggatgttcatcgtgccagtgcttcgtggcggccatcgtatgagcgtcgagataactggtgtaagcatcaaggagagcgtttttcctgcgcctcggggcgtaaggtagcaactggttgaaatcagcatcgctgataagcctgaatggataagagcctccttcaatagcctcaatttcgcttagcaactttccccgcagtggtgcggaatgcttcctgaactctgccttacgtgacgaatggttactgattagtgacggaataaagagccctagcagtgtcagtatcactccgattactgaaataatttccatgagatttccctatgcctgattttatttattcagtattacccttggtgggattcggtttttcttgttttggtcttggatacatccttggcttcgtacgcggacgagactgaacaagaagaataaatccgtctgagagggtggtgaatcctgatatttttacagtgatttttggtggctgtcacctggcggccatcctattttcccctcgttctgagaggatccacagcaatagagggggctaaatgtccgatcctgtctctggtacttcagttgcggccggcggcctgatgggggctagcatgttcggtctggctaccggaatagattacggcgtggtatttggtgcgttcgccggggcggttttttacgtggccacggcagctaacatatcgcgcggtaagctggtggcatactttatgacgtcattcattgttggtgttctgggcgccggtctggtgggttccaagctttcaagctggactggctacagcgaccgtccgcttgatgcgttgggagccgtattaatatcagcgcttatcatcaaagttctgacgtttctcaacagccaggatctaaatagcttgttcaatatgctgacccggttccggggaggaggttcaagtggtaaatgatccttcagcgctggctaatgcagtcatttgcgccgtcattgtgctggcattgatgttctaccaacgaggtagtgcgagacaccgtccgggcatatccgttctggcttatctcatggtgctggtttatgccagtatccctttccgtttcctgtttggcctgtacgagtcatcccactggctggtggtgctggctaacattcttatctgcggcgcggttctctggttcagggggaatgtggcgcgactggttgatgcactgaggcactgatgaaccaatcacaatttcaaagggcggctggtattagcgccgggttagctgcgcgctggtttccgcacattgatactgcaatgaaagaattcggcattactgctccactcgatcaggcgatgttcattgcccagatgggacacgagtccggaggctttacccgactggtggaaaatctgaactatgcagcagatagccttgtgcctacgttcggtaaacaccgtatcaccgcccagcaggccgctgcactcggcagaacggcaacgcaaccagctaatcagcgagcaatcgcgaatctggtgtatgggggcgagtggggcaaaaagaatctcggtaatcaggttgccggtgatggctggaaatatcgcggtcgcggcctgaaacaagttacgggcttgagcaactatcgcagctgcggacaggcgctgaagcttgaccttgtcacccagcctgagttgctggagcgagatgattacgccgcgcgttcagccgcatggttttatgtttcccacggttgtctgcttcattccggtgatgttgaacgcgtaacgctgcttattaacggaggccgcaacggtctggataaacgccgtgcgctgtttaacttggctaaatcagtactggtgtgaggtcgctatgggcattgaaatgattattggtctggcaactgcgttgctggccgttgtcgctggcgcatttgggttaggccatgcgcgtgggaccaacaaggcagaagccaaagccgatcagcagcgaaccgaagagaacgccgctgctaccgtcgccgcggcagaacgccgggctgatgcaacgaaaggggccagtgatgtacaggaagacgttaagcgtatgggcgatgacgatgttgatcgggagctgcgcgaaaagtttacccgccccggtagtcgttgatacggcctgcaactgggtgagggtcatctacctgaccgaccacgatattgaagttctcgaccgtcagacgaagcgcgacattctggcgcacaacaactccgtgctggctaactgcgagaagaaacccaccaataatcagtaagctaatgcttgcaaattagcagttcgtctgctaacgcttcgtgataagattttcagcggaaattatctattaaaaggaatgcgtaatgtggacgtgctgattgacagcgctttcgagggatatctcttcctcttactggatatgtggacagttttaattgttgctttcgtcgggttggctctgtcattttatggcgtgcaaatgcgtagaactgccgtcaccttctttctgcttgctgcgataatcgggactgctggttcgatctatacttaaatgtaggttgcagagaatatgcagaaagtcaacccgcaatccaacggtggctattactgcggttactcgtgtcatatgccctgacacacataatttgaacccaggtcgccaatggcggccttttttattgccagaagcaggagaagaagcatgtcaacgtttcgtttactgaagcctaagagtgaacttcagcttcagtaaagtattcgatcagttacttaacaggtttactttctgaggggaggaaaatatttccgcagtatgggcagatcaatgttatatcgttttttattctcgacaggctatgtgttgactggcgagagcagtgaggacaggtgctttttacaggtctgagtgtacgtatcttgtctttgagcatagacatggttttatcctcgtgagtgattgctaaccatacaccacaggacagtaaatagctcactttttaacctttatttttttgtgactatttggcttgtacggaagatggcaacgaacgattaaatctaatttcgtcagtgcaaggccattgcacctgttcgaaggcgagtgaaccggctaatgttttattttaaagattttcatcgtgtgagtgtgatgacccctggcaggataatcatccgtctggccagactaattgaatagcagttatcgattaacaagaagaactgccattattgtgtggttgctggtatgaaaaaaaatgaaacacactactctcattgcacctccgtcccaacaccagtctgtcggaggtcagttactcgtttaagtgaggctctcccggatggctcctgagagtttatttaatcgataactgtgcatgacaaaaggccgcatttttttgcggcctttttcttagccatcagaaaggccacctccgggtggcttttttaatggcatcacggagccgctttccgaagtggtttgataaagcctcccacatcgcacagaggtaagacatggcagaaatcaccgacgcccagcagattcgcctgaacctgctttccaccctgaactacgacacagcagcagctaaagtcgctgtagagtttgttcaggatagtccgcttaaatatcagccattcatccagcaatacagccgtgtcacatcagagactgaagtggtggcaaagacgatgaaagcagtgcaggaagcaactgaagcgctgccgctctttgataccgctgctgagcagtccagctaggcattacagcaggcattcactgagtgcctgtgataatgctttttttgggttaagcgcaagggtaatctgaaatctccggcactcatcaggagagtaatatgagttatgaaatgtatgaagtggtcaagcagtatctctttgaagtccatggagtgggacaagtaagggctgagatactaaaaacaattaaacctgaaataaacgctccgtatatgtggcgagcaagccacatatacgatggttatgctcctaatcacgggaactcattagaaacagcaattagtgaattaatttattatattgagcactttgatgctgattcagctgaacctgatccaaactattaatcactattttaaaaatcattaagccgcttgcatctgctagtggctttttatcgtacctcaagtgtatcgttggggcgtattctaaagctctagcgcatgaacagagctgtgcacgataaatccatcataattgtttcttaatgtatttcatccaggttaggattagcctctcaatcaaaaggaaagtgaaaatgaagaagctgattattgcatttggatttgtactattggctggctgcgcaaccgtaggcaaagacttctctgagagcgatgtcgcgtccattcagaagggggtgacaactgagcaaacagtattatcaacctttggaaagcctgccacagtaactgctgactctgaaggcaataagatatatacctggacctatgctcacgcaacggcatttagcgtagggcagggcaaggcgttagtggtgaaaataaacaaagatgggattgttgattcttatgttgttagtaagacgcaaccttaacatcgacactttagcaagagcctcgcttcggcggggttttttattatcagcggcaagtagtttcataaagactataaatgcaaatgataactattatcatttaatgggtcctccccgagggatgggttaccacggggcggcggactcgcggaaaacggctagttttcatttttcatagtcatcatcatcatgtgcacaggttattgattttccagatgtcggattttcaatgatgtcgaatcgtataaaaagtgttcaccatcatggaccaggaaatcgctactttaaaactcaatatcaaccagcttgccgggattactggcgtacaccgccagaccgtcgctaccaggctaaaaaatgtcagtcccgcccagggaagcaacagcaaacttaagttgtatcttgtcaccgatattctgacagaattaatgatcccgacggtttcctcatcgaatcttgaagagatgacaccccctgatcgcctcgctcactggaaagcagaaaacgagcggttgaaatttgaagtagataccaagcaacttatccccgccgaagacgtcgcacgtgaattttcaatgatggcgaaagccgtcgtcatggtacttgaaacacttccggacattcttgagcgcgactgtgcacttacgccggttgcggtatcacgcgtgcaaagcgtgattgatgacctgcgcgatcaggttgcccaaaaagtaatggacgcagaaccagaggaggatgagccagaggaggactgatgacaaaacgggcatctgccaaggggatacgccgcgatgtctccggtattcttcgtgccccacgtcgtatgcaggtggccgatgcggtcagctcatatatgcgtgtgccgatgggggcgggtaactccgtaccatgggaccccaatctggccccttatattattgagccgatgaattgtctggcatcccgtgaatatgatgcggtggtgtttgtcggaccggcccgaaccgggaaaacgattggcctgattgatggctggattgtctacaacatcgtttgtgatcccgctgacatgctggttattcaggtctccgaagagaaagcgcgtgaacattccaagaaacgcctcgatcgcacattccggtgtagtccggaagtaaaatcgcgactcagtccgcgtcgtaacgacaataacgttcacgaccgcaccttccgggccggtaactatctcaaactgggctggccgtcagtcaacattatgtcgtcgtcagactataaaagcgtggcgttgactgactatgaccgctttcctgaagatatcgacggggaaggtgatgcattttccctgggttcgaaacgtaccactacgtttatgtccagcggcatgactctggttgagagttcacctggccgagatattcgtgacacgaaatggcgaccaaacactgcacatgaggcaccgccgactaccggcatattatcgttgtttaatcgtggtgaccgccgccgcctttactggccttgcccgcattgcggagaatattttcagccggaggttgcaaatatgaagggctaccgggattcccttgatcccgttgtggcaagtgagtctgcatatctccagtgcccggcctgcaaaggcaggatcaccgcagatatgaaacgtgaactgaatatccgccatgtctggttacgcgatggagaaaaaatagaccgtgatggcaacagatttggggagccgcggcgatcacgcatcgcttcattctggatggaggggcctgcggctgcatatcagacatggtcgcagatgatatacaaattcctgactgctgagcaggaatatgagtccacccagagtgaagagacgctgaaaacggtagttaataccgactttggtcggccttatctaccccgagccagtctcgaacaacgtaagagtgagctgctcgaacgacgcgctgaagacgtgccgaagcgatctgtaccagatggtgtgctctttatgactgcaaccgttgatgtgcagggcggtaaatcccgtcgtttcgtggttcaggtgactggctacggtgagcagggtgagagatggctggtcgatcgctacaacatccgccagtctctgcgggcaaacgagcacggtgaatgttactccatcgatccggcaagttacccggaagactgggatttacttttgtctgacgtgttcgaaaagtcatggcccttagcgagtaacccttcaaaacgcatgcggctcatggcgatggctgtcgattccggcggtgaggatggtgtcaccgataacgcatataagttctggcgtaagtgccgccgggatgggcttggtaaaaagattttcctcttcaagggcgacagtgtccgacgctcaaaactaattacccgaacatttcctgataacactgacagatcaactcgccgggcaaaagccgctggcgatgtgccgctttaccttcttcagactgatgcgctgaaagatcaggtgaataacgccctgtggcgagaatcacccggcccgaactatgtgcatttccctaaatggctcggcagttggttttacgatgagctgacctatgaggaacgttcacccgatggaaaatggagcaaaccgggccgaggtccgaatgaagctttcgatctactcgtttatgccgatgcgctggccatattgcacggatacgaaaagatcaaatggccggatgcgcctgaatgggcgaggcggacaacgtggatcgaagaaagcacgccgaaaactggcgaagcgtcccccacgttatcagcaaaaacgacccatagcagaaaaaaacggaaggcaaataagccggatgttgaaaacaatccgtggactacatcatcaggaggctgggtgtgaaacaaactgatattgaatccattatccagcgttataccgatgcggaaatagctgtgctggatggaaagtctattacattcaacggacagcagatgacgctggagaacctgtccgaaatccgcaaggggcgtcaggaatgggagcgccgtcttgcatccctgttggctcaacgtcacgggcgacctggttataaactcgcgaggtttccatgagcctgttagatgatgcgattggcgtcttttcccctggatggaaagcggcgcggttacgttctagagcaatgatccaggcatatgaagctgttaagcccacccgaacacacaaggcgcgcagggaaaaccgttccgctaaccagctaagccagatgggtgctgtatccctccgtgagcaagcgcgctggctggatagtaatcacgatctcgttatcggcgtgttcgataagcttgaggaacgggtggtaggtgcaaaaggaattattgttgagccccacccggtactgaataacggaaatatagcgaagaaacttgctgaacaaatcagagcgaagtgggcagaatggtcggtcagccctgaggtcacggggcagtttacccgcccgatgcttgagcggttgatgctcaggagctggctcagagacggagaaattttcgctcagatggtgaatggctcagcgcagggacttgagccggtagctggagtaccattctggcttgaagcgcttgaggccgattttgtgccgatgaccaatgatgagtccctgcaactttgtcagggggtatatgtagataactgggggcgcccgaaaaagtacctagtctataaaagtctacctgttaccggccgtcaattggatacgaaagatgtcgatgccgggaatatgcttcatctcaaatttacccgccgtcttcatcagacccgagggacctctctcctttctggtgtgctcatgcgcctcagtgcgctgaaagaatacgaggatgcggagttaacggcagcacgtattgcagctgcgctggggatgtacataaaaaaaggagacgggcaaagttttacggatgagaccaccaaagacaatcgtgacgtaatgattgagccaggcattatttatgatgatctgctgcccggtgaagacatcgggatgatcaagtccgacagaccaaaccctaaccttgaaacattccgaaatggacaattgcgcgctgtcgctgccggtgctcgtctcagcttctccagtacagccagaaactacgatggaacatacagtgcccagcgccaggagttggttgaatcaacagatggttatctgatccttcaggactggttcatcggcgcaatcacccggccaatgtaccgaaactggttaaaaatggcggtagcttctggcgaaattcagctaccacgtgggctggatatggcgtcgctttacaccgcagtttattccggaccggtcatgccgtggatcgacccagttaaagaggctaatgcctggaaagcgcaaatccgaggtggtgctgcgacagaatctgactgggtgcgagctagcggacgcaatccggatgatgtgaaacgtcgtcgcaaggctgaagttgatgataaccgcgaactgggactggtgtatgacaccgatcctgcaaacgataaaggaggcaccagtgccgaagtcaaagaaccggacgccccgtcgtccgaaagccagcgcaagaagtaattcgtggtttcgtatgcaggccagcgccgacaatcaggtagaaatctatatctacgacgagatcggctactggggcgtgaccgcccggcagtttgttaacgaccttaaagcgcttggtgatgtgacccatattaatcttcatatcaattcgcctggtggcgatgtctttgacggcatcgccatttttaatgctcttaaacatcatggtgcgtcaattaccgttcatatcgacggtctggccgcgtctatggcctcggtcattgctatggtgggtaatccggtcatcatgcctgaaaacaccatgatgatgatccataagccctggggctttgctggtggtgatgccaacgatatgcgtgactacgcagagcttctggacaaggttgagtctgttctgatccctgcttatgcagagaaaacgggtaagagctccgatgaaatagcggcgatgctggaagatgaaacctggatggacggcaaagaatgcgtcgctatgggttttgccgaccaggtcaccccctctcttcaggctatggcctgtatccagtctaaacgtattgaggacttcgaaaagatgccaaaaaatattcgcaacatgttaacgccgccgcgagctaccacgcaacgcgatccccagcaaccacaagtgcagcagcctgtggtgagccaaccttccgtaattgacgaaaacaccattcgtgctcaggtaatcgctgagcaaaaggatcgcgttaatggtattaacaacctctttgcgatgtttggtggtaaacacgccgaactgcaggcgcagtgtgtagcagatatggattgttctgtcgatcaggctaaagacaaactgctggtgctgctgggtaaagatgcttcaccatcggcgaaaaccatgccagcgcatattcatgcaggtaacggtaattttgtcgccgatggtattcgccaggcattgatggcgcgtgccggatttgaagatcaggaacgtgacaatgtctacaacggcatgaccctgcgtgaatatgcccgcatggccctgactgagcggggaattggcgtatccagctataacccgatgcagatggtagggctggcgctgacgcacagcacctctgattttggcaacatccttcttgatgtcgccaacaaatcgattttgcagggctgggacgaagctgcagaaacctttgagcagtggacaaagaaaggccagttgtcggactttaagacagcgcatcgtgtggggatgggcggattcccgtctctgcggcaggttcgcgaaggcgctgaatataagtatgtgactaccggcgataaaggtgaaaccattgctcttgccacctacggggaaattttctccatcactcgccaggcaatcatcaacgatgatctgaatcagatcaccgatgttccgatgaaaatgggccgtgctgctaaggcgactataggtgacctggtttacgccatcctgaccaaaaacccaaaactctctgatggtaaggcgttattccacgcagaccacaagaacctgtccaccggtgctatttccgttagcagcctggacgatgcccgtaaactgatgcgcctgcagaaagagggagaacgatctctgaacatccgcccggcatttatgctggtgccggtcgtgctggagacactggctaaccagacgattaaatcagcgagcgtaaaaggggcggatatcaacgccgggattattaacccgatccagaattttgcagatgtgattgcagaggcccgccttgacgaagctgacgcaaaagcctggtatctgatggcggcaaaagggacggacaccatcgaagttgcgtatctgaatggtgttgatactccttacatagatcagcaggaagggtttaccactgacggtatcgctacaaaagttcgtatcgatgctggtgtggcgccgcttgattaccgcggcctggtgaaatccagcggccagtaatcattacagttctgaaaacgacgcccggaagggctttttttatacctgaaatcagccctgtggggctgacaggagacgttatggctaaaaattatgtgcaagacggcaaaaccatccccgtgaaaaattctggtaccgaggaaattctcagcggtacacccgtttctttaggcgggatgattgcggttgcaattaccgatattcagccgggtgatgtaggcgacggattcgctgaaggtgtctttcttttacctaagttgccagctgatgccgtgaccgccggggaaaaggtatatctcaaagctggaaatgttcagctggatgacaccgatgcggtgttagccgggactgcctgggaggatgctgcggcaggcgttaccgtcctggaagtcaaaatcaatggctaatgtctttgacaatatggctggcaggatggatgaactgacggcgaaaaggctgggcagaacggtgactattaatggcgatgagcatattgctgttgaaagtcacctgctgcctgagctggggccggtcgcgggggatgggattaacctggttatcttcagcgctggctatcagtcggcgcggggagatgaggttatttataaaagtcaggtttacaccgttacccgatggctcctctttaatggtaagccgcaaatctggattgaggaggtcacaggtgacgattaaagggctggaagagctcaggcagaacctgagcaatatcagtaaaaatgccattcctcgggcgacatcccagtccattaaccgggtggctggaagggcaatcagccgcagctctacgcgagtggcgaaagagactaaggttaagcgcaaactggtcatgcagcgcgccaaacttaaacgggcaagccctaaaaaaccaatggctaccatcagagtaaatcgtgggaatctcccggcaataaagctggggcatgtccgtgttcagctttcgcggcgtaagcgtgatagcggcaactctggaagcgttctgaagattgggaatttcagcttccctggcgcttttgtgcaacagcttaataatggtcgctggcatgttcttcgacgaaccagtaaatctcgttacccggtagaagtggtgaaagtacctctggccacccccctgactgctgcattcaaagaagaacttcccaaactgatggcatctgatatgccaaaagagattatggcggcccttaaaaatcagataaggctggtgacaaaatgatccacccgcaaatacgaaaagctgttctggacaaactgaagtcaattaactccggaaaaatattctggtatgacggtcggccagctttcctggctccagaggagttgccagcggtcgcagtatatcttaccgatgcgaaggctacgaggggcattattgacgaggaggagtgggaggctgtccttcacattgaggtatttcttaaagccactgccaccgacagcgagctggataaatggatggaaaaccgcatatatccggcgatggtagatgttcctgaactaaccagtcttgtagaaactatcagcgttgtcgggtacgactatcaacgagacgatgaagccacaacatggggctccgccgatctccaatattccataacttatattatgtgaggagcttatgccaatcccaacacctaccacaccgaccaaaggtgccggaacaaccttctggatttacactggaacaggtgacccattcgatgatcccctaagcgatgtcggctggacccgtacagcacaaattaaggagattacgcctggggagctgactgctgaatcatacgatgattcttatattgatgatgaggcacctgaatgggattccactgctcagggggttaaatcagccgggcaaaccagcgttacactcgcatggaaaccgggtgagtctggtcagcaggatcttgttgactggtttatgagtggcgatgagaaatcctacaaaattaaatatccaaatggcgctgttgatctttttaccggttgggtaaatagtctgggtaaaaccattgcgcggaacgaagttattacccgcagtgcacaaattaccaataaaggtaaaccttctctggctgaagataactcttcaattaacccttaatatattcgacagcggtgcccggcaccgcgtagggtaatataatgacttatcttaaaaaagacacattaaatcccagtggtgagaacattttgctgtttgaattatctgcttacagtcgaatgcaatatattgaatttatggttgaagaacggaaagctttaccacctgagggaagcactcctgaagaaaattttaaattggccaccttgttgactatgcgtgatcaggccatgcttgtcgctttatccttgagcgaggcagacgatgagaaccgtgagggaaaagatattttccatgaaatcatgcgcaaatatccaccgggattactgggtagtgcagccataatggtccggatgctttcggggatggttcctcccgctattgatgaaactgaagaaactattaaagaagaggaagaaccggatctggaaaagtcctgacccgctcacgtcgctttgctatgcgcttagccaaagaatttggtcgaccagactggcgcgctatgctttccgaaatgtcttcctcggaatggttcgaatggattgaatattaccaggaacgttgctttagcgacgatcttcttgattcccatttcgctaatttaagctacctcgcaatcagtcttttcaccgatccagacaaacacggtatttccgccctcgattttagtttacttacaacaggtagggaagaaaacgaggacatttctgacgagcagcttatgtcaatagccgagagcattcccggaggagttcgctatgtcccagccagtgggtgatctggtcgttaaaattgatggtgatagcgcaaagtttgatgaggaagttgctcatcttaataagcaactgagtgggttaggaagggcagcaaacgacagctcagcccaggttactgcggcattttcacgtcaggagcgtgccgctaaacgcgcgggtatatcaatcgggcaatataaaaatgcgatgcgtatgttgcctgcgcagttcacagatgttgccactcagttagctggtggtcagagtccttggctaatcatgcttcagcaaggtggtcaggtaaaagactcatttggtgggctggttcctacctttcgtgccttacttggctcagtaacccctctggcgcttggtatcactgcattgaccgccgctggtgcgggaatggggtacatttattataaaggatcgtcgacactttctgatttcaataaaacgctgacgttatctggcaattctgcaggtctgactaccgacagaatgctggtactggcaaaatcgggccagcaggccggacttacctttgatcaaaccagtgactcactgaaggcattaattaatgcgggcgttggtgccggagcccgttttgatgaattaagccaggcggttgcaaaattttctacggcttctggtgtccctgttgaaaaagttgcggaggccttcggaaaactgactaatgatccgacgtctggactgattgcgatggcacaacagttccacaacgtgacatcggagcagatcgcttatgttgctcagctacaacgttctggggacgaggctgcagcattgcaggcggctaacgacgctgcaacgaagggttttaatacacagacccagaccctcatcgataatatgggggcgattgagcgctcagccgactcattaaaacgtgcatttaaatccatgtgggatgctgcacttgatctggggcgtcctgataccgcagatgagatggccagcaaggcagaggctgcttttaaacgggctgatgaaatatggaatctaaggaaaaatgaccgttatgtaaacgatgaggccagagctcgattttggaatgatcgtgagtcagcccgtctggcactggatatggcgcagcaacaggcaggaattgccaaagccagtgtagcggcagcagaaagggaagcggaggccgaatctgataagcagaaatacgcggcccaggcacaggccaattatgctaaatcgcagacggcccttgaaaaatacaccgcacggcagaatgaattaaataaggcactgaaagaaggacatattctccaggctgattacgccataaacatggctgcagctaaaaaggaatatgaggcatcagtaaaaaaaacgccaaaacccaaaggcgtgaaagtttctgctggtgaccgttcgtctgatcaaacgaatactgaaacacttcagttaatgacccagctgaaattgctgcaacagcataccgggcttaacgacactatcagtcagcagcgtaaaaatttatggtccctgcaatcaaaattcacggttatcgaagaagcatcgaaaacccgtgcgctgagtaaagatgaacaatcgttactcaccaacaaagataaagttctggctcaggcagaggtcaatgcaaaattaggcgatcagatcgtcgctcaggaacggctgaataagcttcaggataactcgttaaaatatgttactcagatgcaggaaaagacggctgcattggtagatagtgctggattaggtgacagggacgcacaacgtaataacgagagggcgcaattaaggcaaggttggaaaaatcagggtggaagcctggatgatgaagggtatcagaaagagctttccgcccttgagggctattacgctgcgcaggatgaaatgcgtaataattggttggctggcgttcagtcgtcatgggaaaactatgctgacatggccaccaattacaatcagatcgccgcggatacaaccaatactgcgcttagtggagtaacaagtaatcttcagcagggattgtatgaccttgccactcagtctgaagatgctggcgatgctctgagcaatatggtggaaggatttggcaaaacagttattcagacattgacccaactggccgcacagtggctggtatatgagggcgttcacctcctggtaagtaagaccactcaggcaaccgcgacagctccgatgatcgctaatgcgcaggctacagctcttcaggcccaacttgcagcatatgcatctaccgtcgctatcccaatagtggggccagctctggcacccgcagcactggcagcggctgctggtgtcaccgccccccttgttgctgctatctcagcatcggctttagctggtatggctcacgatggtatcgacaaaatccctgaaacgggaacctggttattgaaaaagggtgaacgcgtaaccacagcgggtacatctgcaaaactggatgccacgttagaccaggttcgccagcaaagaatagcaagcagcgggtcggttgttgctgaattccataataccttcacaggtaaacctgacgataccaccatgcagatggttaaccagcaaatgcgggcgtctgaaaaaaggcttaagcagtactttacttctcaggtacagaatccaagtgaaaattacggtcgtgcacttaaagccgtctatccggggaggcgtatgaaataatgtcagatatttattatccacatgattatatacccggcccgacatacgataattatggatttgaatcgactgatcctatggttcgtaccgacagagtgggggggcttgccaggcagcgtagaagatatacatcagtaccaactaataatactgttgtatggcaatttaaaagtgatgcgcatgcacaagtatttgaagcgtggtatagagacgttttaactgatggtgcggcatggttttacatgaaatgtaaaactccagttggactgaagttttttaaatgtcgatttaatggggtgtataaaggaccatcttatattaaaccaggtctgtggcgttattctgcaacccttgaattaagggagcgaccacttgcccctgtcggttggggatattatccagaatggctggccgggcaatctctccttgatattgcactgaataaggagtggcctaaacatgacggtaattaaccggctgtatgcgtcatccggtcctgaagtcattattggcacacttcagattaatgtgggtgagcagtcgtattatttgtgtgaaggttatgaggacataaccgctatgaccgaggatggggcggaggtgaagttttttgcctgcgcaatatcattctctcttccggcaaggaacgatgatggtacacaggatctgaagttttctttgtgcaatatcgatggtgttgtttctaccgctatacgtgaggccgccgataccttaaaggaaggtaccataatttttcggaagtatatttccactgatctttcgtcacccgctgaaccgccatctgtgatgccgattaagggcggttcctggaaaccggtagtcgttaacattacagccggctttaaaaacgtccttgattatgcctggcctcgcaaccgcttcactttgccttatttccctggtctccgttacacccgataggtatcccatgctgaatattgataaatatctggctgtccgctggcagatgggcggacgggtttttcctgtgcttgattgctacggggttgttcatgaagtgcgccgcgatctcggactcactgactggcccgcttttgaaggcgtggtaaaagagggcgatgaaatgcacaccgcttgcaataacttccgtcaaaacgttgttcgatgtgctccctgccctggtgcggtggccgcctgctatacgggaggagtaatcggtcatctcggtgtcgtggtggagctgggcggcctgctgtatgtgatggagtgcaatccccaccgtaacgtgacgatcctgccgttgacgcgctttgagaagcagtatctgaaagtggagtattaccagtgactattcgtgtatacccatcccgtttaccgggcgaaccgctggaaacgcatcagcatcgggtcatgacagttcacgactggatgtctgaaaatgtagaaaattatcgtccagatatgtggcaaagggttgcctttgaggtcaacaacgtctccatacctccgcaggaatggccgttctgtgtaattaatcctgatagtgatgtaagggtttatccgatacctggtgaagccgtgtcgggttcggttatcgccgcctgggtcgctgcggccgttgctgctgcatcagctatttacgccatcgttatgatgtctcaaatggacaaaggggggtattcctccagtaatggtacgtcccttgatctcaatccggcaaaggccaatcaagcaaaattaggtgatcctattcgtgaggtgcttggtcgctcacggatatatcccgattatgtcgtgcagccggtaacccggtttcaccctgacgatccaacccgcatgaccgtagagatgatgttatgcctgggcttggggaatttcgcttttacaaatggcgatattcgcgtaggcgccacgccagtcacagccctcggcgattcattctcttataacgtttattctcccggtgcggatgtctcaggcgatcgccgtagtgaaaactggttcaacagcacagaggttggcgggacatcaagcggttcaggtctggatatggcccagacatcacccgattctgttgatattaatgccgacagtatggcagtttctggcgccacggtgaccttcaacggacttgatgatgataatgacgacgacgatgatggtaatgccttgccggaatcgtgggtgaccggagccattgtaactatcattgccccggcaaattatcttgtttcaacatcatcaggttatagcgttctgaccggtaatagtctggcggaaatcaatccagtttctggcatggccgttacgctggcgattggtggttcagagtatgatctggtgatcgcttcttatacaccgaaacaggatgcggttcctggaaccggcggtatagcggccagtttacgtgccagtgctgcaccgacaacatatgatttttccgttatggggcagacatttgatatcacctggcacgctacagcgttcaccatctcccttgtagccgattatctgaatatgtcagggcttcttgctgctataaacgaagggcttactggctctggactcatggcgcaggatgatggcggggtcgtgcggatagctgaaatatccagcccctggctgggtggttccatcacctcttcttctcttcccgtatctattttcggcgacagcccggagtttacttccggaactgcatccagcggcgggagtccggcgattactgctaatgtcacgctggcctatggtagcgcaacgggggctgctttctccggcatcccggagggtactcagcgattgtcgctggcgcaccgtgataacgaataccgtattgctgatgcagacggcacgaccgcaacggttcagcggctggtggacggcgttatcgatcctacctggccgggtttttcaccgcgcacgatgatcgactaccaggctaccggtataaacgacaacgatacttggctgggaccttttcttgtgtgcccggaaaatgaagtggttgacgccttcgaggtaaatttctcgtttccgtcgggtatctgtgggtttgacagcaaaggcaaaaagcggatcaggcattgcgagtgggaaatacagtaccgcgtgtatggtgctggtgccggatggacgagtaaacaaggcgtctatgctctgcaaaacgttaatggactcggttttactgagcggtttgagctgtcggtaccgggccttgttgaagtgagatgcagacggcgtaatgagcagggtagtaataatgcacgcgattcaatgtactggcaggccctgcgtgggaggctactggcgcgaccttcttcttatgccggtgtcaccctcatgggggcaacggtcgagacaggcggaaaacttgcggcgcagtcagatcgacgtgtaaacgttgtagccacccggatttatgattccggcacatcccgcagcatttcaggcgcgctttatcatgttgggcgatcgctgggtcttgaaatggactcggcggcaatagacgcgctcgaaagcgcctggtggacgcccgacggtgaaacgtttgattttgcgacaggcgacagtatatcagcgctggaaatgttgcagaaaattgcgaatgccggaaaggggtatttcctgctgaatactcaaggtttagcgtccgtcgggagggaaggaattaagccatggaccggggctattaccccccatgaaatggtagaagaactccagacagatttcagtgcccctaacgacgatgattatgacggcgttgacgtgacctacatcaatggcgcgacatgggcagaggaaactgtacagtgccggacgccggataatccgacccctgtaaaaactgaggcgtttaccctcgatggcgtccttgatcagaatcgcgcttatcagattggcatgcggcggctgatgaaataccgcctgcagagactggttcacaagaccactacggaaatggacgcgctttgctataacgttggcgatcgcattgtactgactgatgatattcctggtagtaacaccatctcgtgtctcatcgacgcgatgacaacagttgatgggatgacaacgtttagtgtttctgagcctttagactggtcattcgcaaatccacgggtatacatcaggtaccaggacgggactgcttctggactgctggaagcctctccggggggtgactatcaagtcttagtgccgtatcagcttgagttcgaaggaattcagattgatgatcctatcatcgaaccgccgcggctgatcttctgcagttcagagaaggatgtgtatcacgccattgtggcggaagttgccccgcaggatgacggcacatgcgaggtaactgcccggcaatatcgtgacgaattctacgcatacgacgatgctacatatcccggcgacgtctcgtaataccccataaaaaccccttattaactcttttcgctcaaaccctcgtttgcgcgaacgccttttttggagcaaaaacatggctgcagatgaactgaatccgccgctgggtacgacgacacctgaaatattcatggataacgtcaagcgcgctgacgaactggtgaacggtccggccggaacggttgacgaccgcggcggggaaccactcgatacctggcgccagatgatggcaaagaatgatgaggtccggcagaacatcattccgctcggcaagcaatacgttgatttgcctacagcgcaggcggatatcgcgaacatacctacaggcagcttcgtgtttgtgagaagcgcggaagactcacgaatagccaacgagtaccagaatgtggcgggtacgctgacggccaccggtaagtttttcatgtcgggggaaggagtattacaagcgatgtcccccgctgtgaaatcagccggttatgcggcattgagggcaaacgccgctgcgctgaaaaccacagcaccagaaatgcagactcgccttcgtgtttccagcgacttcactcaaatcctcgccacgaagaactttgacgggactgtagatgttgctttttctgctgactatgcggacccggtgatgctgaagctgggccatgctgcatggtcgagcacgttctccaactgcacaataacggtgactggtaacgggcgaaaactgtttgagcgcgtgttttttggtggtgaatcgctggaaaatggtgtactgaccacgccgtaccaggagtttgcgctctctgcgttcaccgtgtcctcctctgcgaaacagccgaacggctggacgctgtacatgacgggaactcttccgggtccgctgccttctgacacgtcccgcatgattcgtgaccgctcactgagtgtggcatcactactgccgggcgggggaggcaccgctacgactgacggtgtgagttataacgccacaacctcacgtctggagttcactgtcatgtcagcaggcattaccgctgccggatttgaggataccgccgctggcgctgagtcgtacatgtggtcgctgtatgccgggatgctcctaagccagcaaacgtccgccacgcaggaccgcccggagtattttgttttcttttccgacgccggagctgtaaccgtgacggcaaccgacaaaatcagcacgtcattcaccgtgtggaaaaagcctgttactgcgccgtctgaatcccgttcagtgaaaaacgccgcagacatcagcgcaacccgtgatgacctgattaaaaccctcatccgtgagaacaacgaaaaaatgaataccttcagcgctcaccagggcgcttaccgcatcaccggagctgtcgcggcatactcggcatcgattccatttaacagcgtacttaatctgtccggattatttctcgccactaacttttatcgcagcgtaatcagtatttcagacagcaccgggacggtgaaagaaatcactattctggatggagaggaaattactgcaggggcaatctctacgccgtatcaggatttcaccatcgacccaacggtagcctcatcgctcaccactatcggtaacggcgtggcagtgggttttaaggtttcgctcccgggcgccctgccaactgacacgacccgcattatccgtacccgcgatgggtcactgagcggggcgcatattgatctgattaacagcgccactacagacagcgtgacgtacaaagcgtcaacgggtgaactgctgattctggcgatgagcacgaacatcactgctgctggcatgacggtaacgctggaaaacgcgctggcttacgtgcttgataaataccgcaacacggtattcagccagaaaacggccactgctgtcagcaagccgatggtcacgcagttcgccgtcaatccaggaacactgactgtcacatccaccgacagcgtgaatatttacctttcattcgacctgtttgcacggccgggagagtctgccgcgtcgtctgcctacaaacgtttttccacggtggtaaaaaataacctcccggtagccctgacgaatgtcccgattgaactgaaatgtagctttgcgcctggtgaggctgtctcagaccagtacattgtggttgaagatgaaaacggcaatgcgttcctgccgcagtggtctgatgcgccggatttcaaccgccgccgcaatggctccctgggttactggggcgatggctccctgcgggctggttcgctcgttattatggactcactggcggcaggggtctctaaaaaatacaacatccgggtttacacggtgcgccagcgatacagcatctattcccgcgcagtacgggagtcctctacctccctgcgtgtcagtgcagatgatggcaccacactgacattcgacagctatcgcaactggctaccgtacaagctggggtcaggaggaaaagactacacctcgatcgcggaatttgttctgacgcgacgcgcgggggctggcggggctgcgaccgatttctcggcgatggccactaacgacccgaccgcatcctatcgcatcgtttctgatggcccggtgtttaccgaggttgaaactatcagctacagccagatttcagcaacgtacccggagttttccagccagtttctcaaattcacgacgaggacaaaggttttccagaacggcatgattaaaactgaaaacgttatggcggtggataaagcgatcccggcagatgtgcttttcggtgttcgtatgcgtatgaacctgatttccaccgcagccaaaacgacaaaagcgaaccacaatgttttgtggtccgacaactcagcaaaacagagcctgtcgctgatttacgctaacggtaacgcccgtcgcgatacgacagaaaccatgcctgtttacaacgttgcgtccgccactaccggtaacacctcctatgcaaggcaggatggcggagcggtatcgcctttcaccacgaccggggcagtcccgcagggctgggcgtggagtaacggcttcctgattaacgtcaaagagcaggcagctaataacgacgaccttgctaatcgcgttcagaatccgccggtgggatttgtggctcgtaacacaaccacgcagtacgcccgcacccgtgcactgatgaaccacatcggggatatcgtcgagggatacaccgactggtgggataatgaggccaccgccacggatacgggcaacggcgtcatcaacaccctgggcggtaaaattgtcgccatggtgagaagcggcaagggggattttaactccgtatacgctctctttgaggcgcacgctgatgcgcattacggtggcgtgacgaatatcaacatcggggaagcggttgacctgaaagggctacagtttatttcccgcactatcacgccggtggtgtggtggctgtataaactggcggtgaaaaacggcgatacggcaaaacaggcagcgctgaaaacggcaatcggcaatctggcgaatacggcaaaaatccagtacggcggcacacagaacggcaacagcaacttttatgcggctgctttccgtttgtgggcgatggccttcgcggttggtctggatacagacggcagctacaagaccaacatggaccgtatcgacacgctgtacaccgatgctaccgcgaccggatttgccaacgtgaaaaacatcatcacggacaacaaaaacgagtcggtatcggctgcgcggtatctggcctaccagtcctacgcgatgaacaactatgtgctgggttgccgggcggccgggcgcacaccagtagtcgatatgacaacgacctggctgaacgcgatttcagccgccggcggtctgtcagagtttgactattgcatcgcagagtcaagacgcgggacgcctaccacagtggcgtttttcccgtctctgctggcgttcaacggtgacctttctacagttgaggcatgccatcgactgctggacgggttcgatgaatacgccagcggatggaacgggattgagtacaggctgtgggatctggaataccaggtggttcgtcagacctctttttcagagttcggattcatggtgaacgttttcactgatgcgtacatggaatggtggtttctgaataactgataatcaaactggcggctgtcatggaaattgatagccctaacctgtcttgatcttcccacccattaaaactactgtatgcataaacagtatctatgggaggggagatcatgcttcgacaatcagacatcaaccaggcatttcgggaggcaattcttcgtaactcgaaaggctatcagtatctacacacacgagacttcatctcttgtttgatgctgcggggcattcatttctcagagtcagaagccaatcgctggattgagcgttatcagagctgcttcgctgacaaaacgccggaccataccgagaatagattatggattctgcggaatatggggagggtgatgtaatgactgccagctattttccttctcctgctgctgattacatagagcagaggctgaccgtcacggccgcatgtgatatcagcgctaactcgcaggttatccagactgaccgcggctatgttgttttggacttgtcgttaaaagtgacgcagggaagcgtcgttcttatccgcctggatggcgaactgcagtttgcaaaattgatgggtagctcttttatcacagccgaaggcgagagcatcgaaggtgaggcgctggaagacgttgaagtactcggagtcgcaacccatgcgattaacgacttgagacaggatacaagtcctgtttgataaaaaaaatccccggagcaggcacactcaggggaaaaaacttcataacatcattgctgtgtgcgtctttgcgcggagtatatcttctgagaaaactcctggtatttccagatatttttgatctgaacagttaagttaaagttccggttgcatgggtatgtttttacttaagggggcctggagatgttgaagtgctcggagttgctatgcacacgatcaacagcttgaggctggatactacccctgtttgaaggggagtgtgattaaccgcacgttaactactgtttcctgaaattaacatctgagataataacctcacgaataatagagcaaagcgcgtttaaatgtgagcagtaagaaaacgttaacgttcatgcaatttttgataataaatagtcaactcgccggcatctcagatacttgggctgatttgtgggtattgattttccatacgagccttagtgcgggtaggctgttggcgcttcggtacgatgacatagataatgattcaatactgatacgagagcgtgggagactgaaagcgctgcgcgttgaaattccacctagggcgatggcgatgataactcggcgacgggaaaggtatccagaggatgtttttgtgtttcagagtcattcgaaccgggtaaagtatgaatgtcggccagtcactttaattgctttcaacactgccttaggccgggctgcaaaatccttaccgggagtcaccgtgagcagtagtagcgcaagaaacgtatctcattaatcgcccataagcacctgctggcaaagtagtcaacttgcaaccccttagtgggttatttgtaagctatgagaatggttattgcctcagacccttagggggtaaaattggggcaaattttggggcagaataacgtttggggcacgatttgggacaatcaaatgtccgcatttgtccacatttgaccagaagtcaataaagttaagttgttgaaaaaattgcagaacgttgaatttgctaaactatttttttgcatgccataataaagttaatatttaggcaaccgcgatcaaaaaaattgcgctgtttgcagcaccggacgaggttattgcgtaaactttaaaaactttaccaactcgctgtttctttaaggtcatttgtacgctttactcaccggctgctgcggcgcggaacgagtgtggcggcatatttttgtttggaaaggatacttgggtggctcttatgacgcatgatgctttttcccttcgcggcctcgcggcaggctgcgcgcttttacttctcgttgcgcctgcggtgcaggctgcggaacaactccccgatgcgccatccattgacgcgcgagcctggatcctgatggactatgccagcggcaaagtgctcagcgaaggcaatgccgacgaaaaactcgacccggcgagcctgaccaaaatcatgaccagctacgttgtcggccaggcgttaaaggcgggtaagattaagtctacagatatggtgaccatcggacgcgatgcgtgggccaccggtaacccggcgctgcgcggctcttcggttatgttcctcaagccggggatgcaggtgtcggtagaagatcttaacaagggcgtcatcattcagtccggcaacgacgccagcatcgcgatagccgactacgtggcgggcagccaggacgcgtttgtcagcctgatgaacggctatgcgcagaaaatgggcctgaccaataccacctttatgaccgtgcacggtctggacgcgccgggccagttcagtaccgcccgcgatatggcgctgctcaccaaagcgatgatccatgacgtgccggaagagtatgcgatccataaagaaaaagagttcaccttcaacaaaatccgccagccgaaccgcaaccgcctgctgtggagcacgaacctcaacgctgacggggtgaaaaccgggaccaccgccggggcgggctacaatctggtttcttccgcgacgcaaaacgatatgcgcctgattgccgtcgtgctcggcaccaaaactgaccgtatccgttttaacgaatcagaaaaactgctgacctggggattccgcttctatgaaaccgtgactccgattaaacccgatgccaccttcattacccagcgcgtctggtttggcgatagcagtgaagcgaagctgggggcgggcgaggcgggttccatcacgctgccgaaaggccagctgaaaaacctcaaggccagctacaccctgaatgatgcacagctgaccgcgccgctgaccaaagggcaggttgtcggcaccatcgactttaaactgaatgataaaaccattgagcagcggcagctgattgtaatggaagcggtaaacgaaggcggtttctttagccggatgatcgatttcgtgctgatgaaactgcacggctggttcggcggttggttctcttaaaatgcaggccgcgccctgcggggcgcggttagtaaagcagtgaaatttgtttttccttcgccagcgcgagcagatcgtcatccggacacacgtcgctggctattacgtcaaactgcgataaatcccccatccgcgccggccggactttgccgaatttactgtgatcgacaaccagcacgtggtagcgagcgcttttcatcgcccagtgtttgaccggcagctcttccaggttaaaacaggtcgcgccctgctcgcaatcgacgcccgcggcggaataaaacgcgatgtccgggcacagatggctcagcgtatcctgcaggcttagcggtttaaaaatggcgttgctggcgtggaactcgccgccgcacaaaattgcgcggcactggggcttttcctgtaaggaaagaaaggtattgagcgaatagcagacgccggtaaagggcagggcgctatcgatggcgtcgatgatccacggcgtggtggtcccgcagtcaaaaaaggccatctggtggggctcaagcagctttgccgcatggcgggcggcgcggcgtttttcatccacaaggcgcgttttctgatcgctcagcagatagtgcgttgcgctgcgcggctccagaacgatatagccgcccagcaacacgaccggaccgctgtggccgttgaggtcgcgacgaatggtcatctctgacacgccaagcagggtggccgcttcttttagatggagtttatcactgcgcttgagtgcctgaataagctggctgatgcgttcgtcacgacgagtttccatattccctctaagctgaaagcgccctgcattgacagggcgtcagcggcgattttacctgccggaagaggcttagtcacgcgcaggaatcgggcgctgccgcaactttaccggctggtcaggaacgtctattcgcgcacccagcctttgcgaatcggcagcgaaaagaacaggcggtacagccgctgcagatgctgatagagggtttttccgccgctttgccacagcagttgggcgctaaggcaggcgatcatcgcggtgagcagcccgcccagcatgtccatcggccagtgaacgccgagatagacccgggaccaggcaatcgcgcaggcaacggcgataagcagcgcgcccgaccacaggcggtgccagaacataaaggccagcgcaaaggtaaagcaaatagtaccgtgattgcttgggaaggagttattgggtgaatgatgcaggaagttatagcccacaccggcggcaaacggacgttcatgcggaaaaaacacgccgaatatccatgaaagcgtgaggctaatcgcgagcgccatcatcaccttaaatactagctgacgctggtttggcccccaaagccataaggcgaacaccaataatggcacaataataatcaggtctttggcgataaacgtcgcgatttcaattgcccaccacggcgacgcgggggtggcattgaggaatgcaaacagcgagtagttaatattttccagcatacatccaggctcttgggtccgttagcaacaagccgcccaccttaaaaaacggtggcgataaggtaaagcagtattgtcttaattatcagtttgttatgaatgaaagtgcgtatgtggcttcgttaacagactgagtaaaggagtatatagcctgtaatctaattgaaacataaacgaaatatatacagtgggattttcattcggtgatggcgacgcggtctctgcgtggcgatatttctcttcatcgctcacaattcactatctccccggcacgactttcattaaactttgcgcggttttatttaaataagagatttcatgcacaattcttcgctttcaggcaaacgcctcggacgtcaggcgctgctctttccgctgtgcctggtgttatacgaattcgccacctatatcggcaatgacatgatccagccgggaatgctctcggtggtggaagagtttggcgtgggcaatgagtgggttccgacctcaatgaccgcctatctggccggcggtatgtttttgcagtggctgttggggccgctttcggatcgcatcggccgccgtccggtcatgctgaccggggtggtatggtttatcgtgacctgcctggcgacgctgctggcgcagacgattgagcagttcacgctgctgcgctttttgcagggcatcagcctgtgctttatcggtgcggttggctatgcggcgatacaggagtcttttgaagaggcggtgtgcatcaagatcacggcgctgatggccaacgtcgcgctgattgcgccgctgcttgggccgctggtgggcgcggcctgggttcatctcctgccgtgggagatgatgtttgtcctgtttgccgtgctggccgctatcgccttttttgggctacagaaggcgatgccggaaaccgccacccgcattggcgagaagctatcggttaaagagctggggcgtgattatcgtgaagtgctgaaaaacctgcgctttgtcgccggcgcgctggccaccggttttgtcagcctgccgctgctggcgtggattgcccaatcgccggtgatcatcattagcggcgagcaggcgaccagctacgagtatggtctgctgcaggtgccgatatttggcgcgctgattgccggtaacctggtgctggcgcgccagacttcccgcaagacggtgcgttcgctgattattctcggcggctggccaattatgatcggcctgctgatctccgccatcgcgacggtggcgtcaacccacgcgtatctgtggatgaccgccgggctgagcgtttacgccttcggcattgggctcgccaacgccgggctggtgcgcctgacgctgtttgccagcgagatgagcaagggaacggtgtcggcggcgatggggatgctgcaaatgctgatctttaccgtgggtatcgaagtgagcaagcacgcctatgaggctggcggcagcggactcttcagcttgctcaacctgctgagcggggtgctctggctggcgatgacggtctactttctgaaggataaacgcgtaggcagctccctcgaaccgcagtaatcttcacatgccctgctgcgacgttacgcgccgcagcaggcgcgccctcaggcgaacggcgcttcgcgattaagcactttatcaataatatgcagtacgccttcttcgttattgtgcggcgcacgatagccagcaacggccttcaccggcgcggcggcgttggccatcgcgtaaccgaatccggcatgctgcagcatttcaatatcgttgccgctatcgccaaaggcgaccacttcatgattgtcgatcccccagcgctcctgcaggatgcgcagtccgttagctttgtgtaccccaggaataatcaggtcaatgctgccgtagccggtagcgaccgcggtcaccatatcgccaagcgcagcgtgcagcttcggctgtatctcagggatcagctggtccgggacgttgagaccgaacttcagaatctcatcatcagcaatatgattaaaatcgtcgaccagttcgaggcgatgatagtactttgccgcgaccgctttcagcgcatcgttatagcggttgagggtataagcgctgcgcttaccgcaggcgataatttcaatgttggtcagcgtctggagatgatcgatgacggtattgaaatgctcctgcggcatccggcagttaaatacatcttctccggcgctgaccacccagccgccgttttcggcgacaaaggcgatctcgtgcgctacctccgggaagaaggagataagctggtaatactggttgccgctggcgacgacgaagcggatgccctgctcgcgcatccgttgatactgggcgaggaagcgctgacggttataggttttggcatcgctcagaaaagtgccgtccatgtctaccgcaatcattttgatgctcattaactgttctccatcacgggttcagattgtggcttcgctaccgcgcgagcgacgatggccgcgaccagcacgagtgccagcaccaccatcatggcgctgcgcaggccgaagtgttcgccgagaaagcccagcagcggcggcccgacgaggaaggcgaggtagccggtaatcgccaccacgctgacgcgcttcggcgcatcggggccggtgtcgctggcggcagaaatggtcagcgggaagcccagcgacgcgccgagaccccataatagtacggagagaccggcgacccacgggttatcgacgaaaataatcaggccaatgcccagggcgcccattaccgcgctggcgcgaaccaccgtcacccggctgtagcggtcaataaaccagccgccggtaaagcggccaagggtcatgccgagggtgaagcctgcgtaaatcagcgagccggaggttgggctgaagccgtggccgtcaaccatcagcagcggcagccagtcgttggcggagccttcagcaaaggccatggccaggacgatcgcgccaatcagcagcagctgggcatcgcgccatatcggcaggcctttgccttcatggcgcgccgcttccgccgcatttttgccggtgccttcagggatcgcgcgaatggcgatagcaatgggggcgacggccaccagcgccgccagcaggatgtgcggcgcggcgggcaggccgaagccggttaccgccataccaatcccggcgccgacgagcgtaccgaagctgtagaaaccatgcatcatcggcaggacggttttattcatctcacgttcaacggcggcgccttcgacgttaatggccacttccgcggagccaaagctggcgccgaagatggctaagccgatagcaaacagcaccgccgaggtaaaccatagcgcggcgctgagcaccagcatgccgaccaccgcgcaggacatggtggcgcgaatcactttacgggtgccgaatcgattgaccagccacgctgagcagaggatgccgctcatcgaacctattgatagtccaaataatacaatccccatttccgccgtcgatagcgcgagcagatcgcgaatcgccggcgtgcgggtcgcccatgaggccatgagtaatccggggataaaaaagaacatgaagagcgcccacagccttagctggagggctctgcgggaggtttgcgctgtcatccgtaaatgcccgagagtgaagagatgcagacaacagtagcaaggttgtgtacatttgtacatccaggcaggctgccgcggaatgcttttttattgacctctatgattcgattcagcctgaggcatatttgacgcgtacgccgtgggattcagcatctgttttaatgaaagaggaaaaggggatggcccgtcgaccaaacgacccgcagcggcgggagcggattttgcaggcgacgctggacacgatcgcgatacacggtatccacgcggtcacgcaccggaaaatcgccacctgcgcgggcgtgccgctgggctcgctgacctactatttcagcggcattgaggcgctggtcgaagaggcgttcagcctgtttaccggccagatgtcggcgcagtatcagcagttttttgccgatgtgcatagccgcgaagaggcctgtgacgccattgcggagctgatttttagcgcccaggtgaccaccgcgcgcaatatggagctgatgtatcagctgtatgctttttgcagcagccagccgaatttaaaagcggtcatgcagaactggatgctgcgcagccagcggacccttgagcagtggtttgaaccggccacggcccgcgggcttgacgcctttatcgaggggatgacgctgcacttcgtgaccgacagagcgccgctatcgagagaagcgattcgactgatggtagaccggctggcgggagcgtgagcggggcgcagaaaacaaaaaaaatttatgtaaattggtcaatgaaaacaattagttgcatgatggtcaataagttaggtgagtggtaaggagtggcgatcacggggcaatgccaaccgctgctgccacttggctcatcgtgacttattttaaacgccagggacctttctcctcgacttgctccacagctccttctgactcaagttcgcgaaggagggctacagcccaatattgttgctgtgtactgggggctttaggataatcccccaatcgagaccgcagagacgaaatacttctgcttgcttcactcctttaccatttatgcttccatccgggtgctttgccaaagcagcaagagccagttcttttgctttagcgcgaagttctagcccctgtatctgtaactcattcataatcatattattcctgataatcaagaccgtcttaataatactccgttgcaggctcatctccatagcatgagcaaaaaaatgattaggaaaatgagcgctgggcttcgtttggttaaaccgacgcgccggaaaggatacgggtagtagattaaagattagctgagaccgcagcttgaatatgagttgaagtccaaaggttttgacggcaacgagcaggatattgatttactgctgcgtggcggaagtattctattattggcaggtttacgccttttctaccgaaaccaggctttgcatgaagacgataaatgtcggtagtggttagaacttatggcccagctagttgccagctcggattgtgcgataacgataaggagactgccattccgtggttgtcagaactgacgagcgatctagttactaggttgagtaagtacgggtaggcaaggatgaaagcaagcattagccgttttgcgtcatttgtaacgttctccaaaaggacgcaccagcgtttgagaaggagtgcatgtctatggtgcaggatttgcatgatctaaaaaggatcgtaatggtccaaaatcgcctgggttgtcgggttttcaggcccatcatgtatctgcatgaaaacaacttcacaaagctggcagacgtggcggggatttgagcgcgcgcaacgtaagttaatgggaaacgttgcgattgaaggtgttttgattttgtgcaaatctagtatctcttcatactcggtgagactcagcaatggaaagtaatgcaaactctaagaaaaaaatcgattctgggaaccaaagattagcatccttattagatgacgttacccgtggaaacatcaagatcccggctttccagcgagattttgtttggacagatgaacaaatattagggcttatcgactctatttatagtgggtatccggttggttcattattattatggtcgactaaaactccattgaaatttgaaaggaatgtaggtgggtttcatctccctgaggtcaaagaggattatcctgtaaattatgtgttagatggacagcagcgtttaacaactttgtttggtgtgttcaatgcggataggaaaacagaaaacaatgaattagcatcacgatttaatatacattttgttccttccaatgacgaattctgtaattacaaagatctgccgaatggtgttagtagtgttccactaagtagtattcttgatactgcgaaacttctgccggagttgaggcgattcccagttgatgaacaagataaaattgctaaccttgtagataaatttaaagattatgagtttcctatagttacgattaaagaaagaagcaaccaagaagtttgtagaatatttcagaggattaactcatctggaacaagtttaagtaccattgagctgctgactgcatggacatggtcagaaaaattcgatttacgcacagagatggattcattaaaagattatcttgcatctgtggggtatgaacaagtcgatgaagtccttttaatgcgttgtttgaccgcaataatcaataaaaaaatagattcagatactttgattgatgttgatccaacaattcttttatcctcaatggaggatttaaaaagaggtgtgcgaagttctgttgattttttagcaaacgatttaaaaattaagaattctatattcttacctttccctattatgttagttccgataacctatttcttcgctaaaaccgctcgacctacaggacatcaatatagttctattaagcgatggttttggtgttgtgcattttcacaaaggtataaagctgggacaaatacttatgttatggaagatattatctctatggagggtataataaattcacctgatagctatattcaaccaataccaaaaattgaagcggatttctttaaaaaaacatggcgaataaactcctctgctgcaaaggcctccatttgtttattagctcaactatctcctcgaagtttcattactggtaaagtggtagatcttgattctgcattgtcagcatataacgcaaggcaatttcatcatatttatcctaaggcataccttgctaagcaaggttttgcatttcatgagtcaaatataattgcaaatatagcgtttttaacggctgaagataataataaaatttcagattcaaaccccgatacttattttaaagcagtacatgaggcagagaaagatttgatttttgatgcagcggtaattgatgaaaaattacgagatggtaaaagttcttatggggagtttatcaatcagcgtgaaatggatttaaatgatcttgcttcaaaagcaatgacagggaaaatatagtaagcagtaaaatatgtttgctatatttaaaatattggatgtctttctttgaaaggaaacttactggaaaggatgacatccttgtttgttcaattattctttcccatcaaccttcgttgaattggctctaattcattttccacaaatactatacttgccttcttcacagccccaactccaatattgatcggtataatctccttcagcttagatggcatgcggtgtgctgccataatgtcattgcggctaacatttttaatattcagaaatacatcctatgccttctggctataaatgatgaggtggaaactgtcacctgtgacatcctgccgcaatggctaattgtattataaattatgttaaatattcataacttttcttgatttctaatttattaagctttgtgatttttctgtttatatataaatcaataaacatagctactcctaacatagtgaaacatagtaatgatagataaataattggcgttatgactataagtgcaagggagtttttattagtctcttttgataactcatcttttttttgtggatctaacatataactacaaataaatagttttgtttctggtttaattaacgtgattttatccaatttgtttttatcgatgcaagtttctggcgttatatcccacgcaggagtatccggtgggcttgttgccgctcctggttttatccaaaatgagtcatttgtttctttgtgtgtatgggaaatccagtatattggctcaacggtaatgattttagtgaactgataaaaaccaattaagggaattgctataacaatgatgccaagagtagtgagggtgattttttctcgtttaccgtgtggtttagtactaactttgtacttgcaaaggctaagcctaattatcggttttgctaatccgatggtggatactaaaaaatcctcttcaggatggattttatttagccatgaccaaaaggaagagactcctcctgcgagccatttaaatatcaatcctccaattgccgtagcaagaaaggcatttattttatcgaaatccatatatctttccttctcaattaggtattcgagattatatatatcagagaccaaacaatgaagtgaagttcattaaaaattcaatcgcgggcattctgacactatgaatgctcaattagccgaaatcataggccttatcatcaatctgattcgcaattgcattgtgactgaagtggaccgggacgactggctttgctgggtggaaactggggccttgaaaccagcgggattaactggctgacttaccgcgccagttaatcccgcacctacgtgtaaatgccagttaaggtcatcgactttaatcaacccatcgataatgtgaactaggctatcacagcgttaacgcatacggtcaaatccggactacgagtttaggaccagcatagatgtggatgtgtaaaatgatgatttgcccattatgtggaagtgcagcccatactcgcagcagtttccaggtctcttcaatgaccaaagaacgttacaaccagtgccagaatatcaactgcagccatacgttcgtaacgcatgagacttttgttcgctcaatttctacacctaaagaggcccatcctgtgcagcctcaccccacaaattcaggccaggctgcgctagctctttgaggctgtcgccactttgtcgccatgtcttaaaaagagggtttgtaactcaatgattttaaaggctgtaaaattcaggcaacaaaaaacccatcaaccttgaacctaagtggcggggttgatgggctccacaaaatggggacatcaaagaaaagcagtggcactacttatgactgatgccagcaaaaaaagttctgcgtatgcgcgttttttttcttaaaaaattcactgtagccccggccagatgatgacaatcagcgtacctgccagggttaacaacacgttagcgatggcgtaggtccccgcgtatcccagcgcaggaatattgctgcgcgcggtatcgctgatgatttccatcgccggcgcgcaggtacgggcccccatcatggcgccgaagagcatcgcccggttcatgcgcagcacgtacgcgccgaacaggaagcagataaccaccggcaccaggctgacgataaggcccgccgccagcatctgaccgccgacggcgccgaggccgttatttatgccggcgcccgcgctgagccccacgcctgccataaacaccatcaggccgaactccttcaccatattcagcgctccctgcggaatgtagccaaacgtcggatggttggcgcgcaggaaaccgagcataatgccggcaaacagcagaccggcggcgttaccgatgccgaagctgaacgagctgaactggaaggtgatcatgccgatcatcaggccaacgataaagaaggcgcagaaggcgagcaggtcggtcacctggctgtggatggagataaagccgatacgatccgcgacggttttaacgcgacgcgcgtcgccgctgacctgcagcacatcgcccttgttgagcaccacgttatcgtcgataggcatttcgatctggctgcggataacgcggtttaagaagcagccgtgatcggtcagcttcagctgcgccaggcgacggccgacggcattgtggtttttgaccacgatctcttcggtgacgatgcgcatatcgagcagatcgcggtcgaagacctctttgccgttacggaagcttgggtcgaggcgggcatgggcatccgggtaacctaccagggcgatatcatcgcccatctgcagcaccgcatcgccgtccgggttcgcgagaatgccgttgcggcggatgcgctcaatgtagcagccggtctggcggtaaatgcccagctcgcgcaggtttttaccatcagcccacgccaccagctccggaccgacgcggtaggcgcggatcaccggcagatagaccttgcgccgggagtcggtatcgaggccgcgctcgcgggcgatttgctgggcgctggtctgcaaatcctgatgctgcagcttcggcatatagcgggcgccgacgatcaggctgaccaggccaatcaggtaggtcagcgcatagccgaggctcagatgatcgagcgagagggcgagctggtcgctgggcatgccgaagtgccgtagcgtatccccggcgcccaccagcacgggcgtggaggtcatggcgccggcgagcatcccggccgtcaggccgatatcccagccgaagagcttacccagccccatggcgatcagcatcgcgctgccgaccatcaccagcgcgagcatcaggtaatttttgccgtcgcgaaaaaaaatgaaaaaaagttgggccccgcttccacgccgacgcagaaaataaacagcataaagccgagattgagggcatcagtgttaatactgaaatgctgttgccctaataatagggaaaccactaaaacgccaatggaattaccaagttgtaccgacccgagacgcagtttcccgaggcagagtcctaatgcaagcacaacgaacaataacaggatgtaattcccgtttaacaaatctgcgacgtttatattcacgaaagccaacttctcatttactagtaagttgttgaaggaaatggttatttggtctaaggttggtccagtgttcgcgttgtcccgaacgctattctggcatcccgttataaccagcaaaatatagtcgacagtttaatctttcctggaggctgcggctagtaacaatcgtgtttacattgacgggatcttttattggcatggattgccagaatctttatctgactgggcgaagtggaagttggttagaggcaaaatcaggaggatgtcgtgaaatctgagcgtgcttgggccggtattatctgtgggttctttctatttatcgtggtttgtttatcactactgttacatatgaaaggcgcctttcgggctaccggtcaccctgagctcgggctgctgttctttttgctccccggtgcggcggcaagctgcctctctcccgggcagcgggtgctgcgtccgcttatcggcgcgatgctggctgcacctgtctgtctggtggttatgcggcttttctttgtgaccgagcgttctttctggcaggaactggcgtggctgtttagcgcggtgttctggtgcgcgctgggcgcgctgtgctttttgtttatttgcgcctggcttgataccagacgcaggcactcgtcagaggagtgagccgtctcaggcgaacaggccgagattctctttcgcccaggcttcaaagtcagtgcagccgccaatgtgcttctgatcgacaaaaatctgcggtacggtttcaaccggtttacccacggttttttccaggtcggctttgctgatgccttctgcgtgaatatcaatatagcgatagttaaaatcatcacgctcgttgctcagtttttccgccagctctttggcgcgaacgcaataggggcagcctggacgaccaaaaattaccgtaaacatagtccttctccttaaacctcagccggatggcgaatgccgcgtatcatgccgcgttatgtcgaggagggaaagaaggttctgccttttgcttcgatggcttaaggctatgtttggtaaatattctgctgatgaaaccgctatactcccctgatacgcgaccggtttttgcccgggggcgtgcatgattttgaccggaggagcgttatgcgatcgcccgctgcattaccaaaaagcattctggtagtcgagattatcggcatggtgctgttgaccctggcctggctctcgctcaaccagtacgtcagcctgcccgcgccgttttccagcccaacggcggcgctgctgatgatcttcgcggggatcctgctgatgcttccggccgccgtggcgttaatgtggcgagtggcgaaagtgattgccccgcagttgacgcaaacgaaaaccccaccttcttcattgcctgacagagaaaaacgagatgacgccgaccattgagctgctgcgtagccaccgttctattcgccattttaccgacgcgccgataagcgacgaacagcgcgccgcgattattgccagcgcgcagggcgcttccagctccagttttttacaatgctcctcaattattcgcgttaccgacccggaaatacgccagcagctggtcccgctgagcggcggccagcagcacgtagcgcaggccgctgaattttgggtattctgcgctgatttcaatcgcaatctgcaaatctgcccggacgctcagctgggcctcgccgaacagctgctgctgggctgcgtcgataccgcgattctggcgcagaatgcgctggtggcggcggaatcccttggcctcggcggcgtctatattggcggcctgcgcaacaatatcgatgcggtgaccgagctgctgaagctcccgcagcacgtactgccgctgtttggcctgtgccttggctggccggacgataacccggaggtgaaaccgcgcatgccgtcggcgatgctgatgcatgaaaatcactatcagccggtggacgacgcggtgcttgcggaatatgacgagcagatagcgcagtattatctctctcgcggcagcaatacgcgtcgcgatacctggagcgaccatatccgtcggactattgttaaagagagccgtccgtttattctgcaatatctgcataagcagggatgggctacgcgctgattgcgtgtaaactgccctcggtctgacgcaaggaaattccgcaggtcagcgctaattgactaccagaggcccgccagagcgggtcttttcgcagaggtgcagggtgaaaattgccatattatcccgggatggaacgctttattcatgtcgacgcctgcgcgaagccgcgcaaaaacgcggacaccaggtggaaatcctcgatccgctttcctgttatatgaacgtcagcccggtggcctcgtcgattcactataaaggtcgccagctcccgcatttcgacgccgtgatcccgcgcattggcacggcgatcacctactatggtaccgcggcgctgcgtcagtttgagctgctgggcagctatccgctgaatgaatcggtggcgattacccgcgcccgcgacaagctgcgctcgctccagctgctggcccgtcaggggatcgatctgccgctcaccggtattgcccattcgccagacgataccagcgacctgattgccatggttggcggcgcgccgctggtggtaaagctggtggagggtacccagggcatcggcgtcgtgctggccgaaacgcgccaggcggcagagagcgtcatcgacgcttttcgcggcctgaatgcgcatattctggtgcaggagtatatcgccgaggcgaaggggcgggacgtgcgctgcctcgtggtgggtaatgaagtggtggcggcaattgaacggcgggcgaaggagggggattttcgctctaacctgcatcgcggcggcgtggcgtcggtggcgtatatcagcgagcaggagcgtgaaatggccatcaaggccgcgcaaacgctcgggctggacgtggccggcgttgatatcctgcgcgccgcgcgcggtcctctggtgatggaggtcaatgcttctcctgggctggaaggaattgaaaccaccaccggcgtcgatattgccggcaaaatgatcgcctggatcgaacgacaagccacgcccggattttgtctgaaaatgggcggataattccctttcacgacaccgtcatggtacaggacgctttttttgcgtaagctatggcgtcgcatttttcacagtaagaggtcacaggtcatatggattcactggtcgttccgggtcttgatacgttacgtcaatggctcgacgaattgggcatcagcttttttgagtgtgattcctgccaggcactgcacctgccgcatatgcaaaatttcgaaggcatttttgatgccaaacttgacctggtggataacgtggtgcttttctccgcgctggcagaggtgaaaccctccgcgctgctgccgctctccgccgatctttctgcgattaacgccagttcgttgacggtgaaagctttcctcgatattcaggatgataatctgccgaagctggtggtgtgccaggccttgaccgtaggcgtcggcgtgacgatcgatcagttcgcgtggtttttccgccagagcgaagaacagatatcgatggtcatcctcgaagccagcgccaatcaggtgctgtataaatctgaggaagaagagccggtggctgagaatattcagtaccattttcttcactaagcctgtcgaaaaatagcgcagccactgccatagcggctgcgtattacatgcttttattctgctattaaccttccgtaaaagaatttttcaccgccattccgccgctttcggcttatcacatagacccttattgcataaaaaattgataaaagccgtttttttacctgggctatagcctcttattctggctacagttattctgacgctgcttccagttgcgggcaaccattccgggagaggtcctctctccttttcttaggcaatgaaaaaatatgcatgattattgcatgcgaacaagtgcgtatattcagcccgcttgttaacgggcattgagaaggaataagagatatgaccgcctttggtaaaaaatggttaacaggtctggttacgggtgcgctgatggccgtttctgccggttcgctcgcagccgaacaaaaaaccctgcatgtttataactggtctgattatattgcgccggatacggtggcgaattttgaaaaagagaccggtattaaagtggtgtatgacgtctttgactccaacgaagtgctggagggtaagctcatggcgggcagcaccggttttgacctggtggtgccgtcggcgagcttccttgagcgccagctggcggccggggtgttccagccgctggataaaagtaagcttcccaactggaaaaatctcgatccggaagtattgaagctggtcgcgaagcacgaccccgacaataaatacgcgatcccgtacctgtgggcgacaaccggcataggctacaacatcgataaagtgaaagccgtgctgggcaaagatgcgccgctggacagctgggatctggtgatgaagccggaaaacctggaaaagctgaaaagctgcggcgtctccttcctggatgccccggaagagattttcgccaccgtgctgaactatctcggcaaagatcctaacagtactaaagccgatgactacaccggcccggcgaccgatctgctgctgaagctgcgtccgaatattcgctatttccactcctctcagtacatcaacgacctggcgaacggtgatatctgcgtcgctatcggctgggcgggcgacgtatggcaggcggctaaccgggcgaaagaagcgaaaaacggggtgaatgtttcctactatattccgaaagagggcgcgctggcgttcttcgacgtcttcgccatgccggcggatgcgaaaaacaaagatgaggcttatcagttcctgaactatctgatgcgtccggaggttatcgcccacatcagcgatcatgtctattacgctaacggcaacaaagcctctgttccgctggtcagcgaagcgatccgcaataacccggccatttacccgccggctgacgtcttcgccaagctgttcaccctgaaagtccaggatccgaaaatcgaccgcgtgcgtactcgcgcgtggacgaaggtgaaaagcggtaagtaattctccgtgagttgtaggccggataagcgtcgcgctgccggcaacaggcgcaccgcgatggtgcgcctgcaccatgatttgatttctgccggagaacaccccgtgaatgatgtgattcctcgcccgcaggcgaaaacccccaaagcgctgaccccgctgctggaaatccgtaatttaaccaagtccttcgatggccagcacgccgtcgatgacgtcaatctcaccatttataaaggcgaaatttttgccctgctgggcgcatccggctgcggcaagtcaaccctgctgcgcatgctggcgggatttgaacagcctaccgccggacagattgtcctggatggcgtcgatctggcgcgggtgccgccgtatcagcggccgattaatatgatgttccagtcctacgcgctgtttccccatatgacggtggagcagaatatcgcctttggcctcaagcaggacaaattgcccaaggccgaaatcaccagccgggtgcaggagatgctggcgctggtgcatatgcaggagttcgcaaagcgtaaaccgcatcagctctccggcggccagcgtcagcgcgtggccctggcccgcagcctggcgaaaagaccgaaactgctgctgcttgatgagccaatgggggcgctggataagaagctgcgcgacaggatgcagctggaagtggttgatatccttgagcgcgtcggcgttacctgcgtgatggtgacccacgatcaggaagaggcgatgaccatggcggggcgtatcgccattatgaaccgcggtaagttcgtgcaaatcggcgagccggaggaaatctacgagcacccgaccacccgctacagcgcggagtttatcggctcggtcaacgtctttgaagggctggtgaaagagcgtcaggaagatggcctggtgctggactctccgggcctgacccatccgctgaaggtcgatcccgatgcctcagtcgtcgataacgtgccggtgtgggtggccctgcgcccggaaaaaatcatgctctgcgaagacccgcccgcggatggctataacttcgcggtgggcgaggttatctatattgcctatctcggcgacctgtctatctaccatgtgcgcctgaaaagcgggcagatgctgagcgctcagctgcaaaacgaacaccgttaccgtaaaggggctcccacctggggtgatgaggtgcgtttgtgctgggatgccgatagctgcgtcgtgttgacggtgtaaggagagggcgatgagtacattagaacccccgtcaggcgtaaaaaaacctggcggttttgcgctgtggctggcgcggctgcagatggcccacgggcgcaagctggtcattgcgctgccctacgtgtggctgatcctgctgtttctgctgccgttcctgatcgtctttaaaatcagccttgcggagatggcgcgggcgatcccaccctataccgacctgctggagtgggccgacggtcagcttacgttaacgctgaatctcgggaatttcctgcagctcaccgacgatccgctctattttgaagcgtatctgcaatcgcttcaggtggcggcgatctcgacgttctgctgcctgctgttggggtatccgctggcgtgggcggtggcgcacagtaagccatcgacgcgaaatatcctgctgctgctggtgatcctgccgtcatggacctccttcctgatccgcgtctatgcctggatggggctgctgaaaagcaacggcgtgctgaacaacttcctgctgtggctgggggtcatcgaccagccgctggagatcctgcacaccaacctggcggtctatatcggtattgtttacgcctatctgccgtttatggtgctgccgatctataccgccctcacgcgtatcgattactcgttggtggaggcgtcgctggatctgggtgcccggccgctgaagaccttcttccaggtgatcgttcccctcaccaaaggcgggattattgccgggtcgatgctggtgtttattccggcagtcggggagttcgttatcccggaactgctgggcgggccagacagcattatgattggccgcgtgctgtggcaggagtttttcaataaccgcgactggccggtggcgtctgcggtggcgatcgtgatgctgttgctgctgatcgtaccgatcatgtggttccacaagcatcagcaaaaacaggtgggggaacacggatgaataatttaccggtagtccgttcgccgtggcgaattttgattctgctgctcggctttacctttctgtatgccccgatgctgatgctggtgatttactcattcaacagctcaaagctggtgacggtatgggcggggtggtcgacgcgctggtatcgcgagctgtttcatgacgatgcgatgatgagcgcggtaggcttaagtctgaccattgccgcctgcgccgcgacggcggcggtgatcctcggtaccattgccgcagtggtgatggtgcgttttggccgcttccgcggttcaaacggctttgcttttatgatcaccgcgccgctggtgatgcccgatgtgattaccggcctgtcgctgctgctgctgtttgtcgcgctggggcattcaattggctggccgtcggatcgcggcatgctgaccatctggctggcgcacgtgaccttctgtaccgcgtacgtcgcggtggtcatttcatcgcgcctgcgtgagctggaccactctattgaagaggcggcgatggatctgggcgccgcgccgctgaaggtctttttcgtcattacgctgccgatgattatgccggcggtggtctccggttggctgctggcctttacgttgtcgctcgacgacctggttattgccagctttgtttccgggccgggggcgacgacgctgccgatgctggtcttctccagcgtgcgcatgggagtcaacccggagattaacgccctggcgacgttaatcctcggcgtggtcgggattgttggttttatcgcctggtatttgatggcccgcgcggaaaagcagcgggtgcgcgatatccagcgtgcaagaagcggctgaaccacctaaaatctgcaatagagttaacatcggcgccgcatttgtggcgccgttttcatggaagactttacgttgggattgtttactaaaacgcgttcctctcatgctcgtcttaacgttcctgcgctggtgcaggtggcggccttcgccattattttaatccgcggcctggatttgctgatgatcctcaaccagcttggcgttcagggaatcgcggattttgtccatcgcagcgtgcagacctgggcgcttaccctggtgtttctctcaagtctggtgctggtatttattgaaatctggtgcgcgttttcgctggtaaaagggcgcaactgggcgcgttggctgttcttgttgacgcagattatcgtgattggctacctgtgggccgcttcattgggctacggttatcccgagctgtttagtattgccggggaatcgaagcgcgaaatctttcgctccctggtgctgcaaaaactaccggatctgctggtgctggcgatgctgtttgtgccggccccgtgccgacgctttttccgtttacagtaacggtgatacaatccccgcccctgtttttttgaaggtcttgttatgcattgcgcactttatgacgcgggtcgctgccgctcctgccagtggctggaactgccggtatcccaacagctcgccgataaaatggccgatcttcgcgcgcttctcgccgatgcgcccgtcgctgaatggtgcgcaccggtttgcgggccggaaagcgggtttcgcaacaaagcgaaaatggtggtcagcggtagcgtggagcgcccattgctcgggatgctgcaccgtgatggcgccccggaagacctgaccgactgtccgctttatccgcaaagcttcgcgcccgtcttcgctgcgctcaagccgtttatcgcccgcgccgggctcacgccctataacgttgcccgcaggcgcggagagctgaagtacattctgctgaccgaaagccggctcgacggcggtatgatgctgcgctttgtcctgcgctcggagagcaagcttgcccagctgcgcgccgcgctgccggagcttcaggcgctgctgccgcagctgcaggtgattaccgccaatattcagccggtgcatatggccatcatggaaggagagcgggaaattttcctcaccgaccagcaggcgctggcggaaaatttcaacggcgtgccgctgtggatccgcccgcaaagcttctttcagaccaacccggcggtggccagccgtctgtatgccaccgctcgcgactgggtgcgccagctgccggtcaaccatatgtgggatctcttctgcggggtgggcggctttggtctgcacagcgcaacgcctgagatgcgcctgaccgggattgaaattgccccggaggcgatcgcctgcgcgaagcagtccgcggcgcagctcgggctgaataatctgcattttcaggcgctcgattccacgcagtttgcgaccggcgaaggcgacattcccgatctggttctggtgaatccgccgcgtcgcggtatcggcgacggcctgtgcgactatttaaaccgtatggcgccaggctttattatctactccagctgcaacgcccggacgatggcgaaagatatcgctcgcctggccggttatcgcattgagcgggtccagctgttcgatatgttcccccataccgcccactatgaggtactgagcctgctggttcgcgaagtataaacaaaatgtgaactcttcaggcggtgaagatcgggtaagcttggctaatcagaacgtaagaatagcggagtgctgccggtggcaaaaaaaatcctgttggttgaagatgatgaagatatcgccgcgctgctgcgcctgaatctgctggatgagggctatcagattgtccacgtggcggacggagcccaggccctgcgcctgctggaaaaagagctttgggatgcggtgatcctcgacctgatgctgccgggcgtagacggtctggaaatttgtcggcgcattcgtcagcaaacccgctatctgccggtgattattatcagcgctcgcgccagcgaaacccagcgggtacaggggctggagatgggagcggatgattatctggccaaaccgttttcgattctcgaactgaccgcccgggtcaaagcggtgttccgtcgtcaggaggcgatggggcagaatctgctgatggatgccggccgtatcgccagccatggtttaagcattgaccccttgtcgcgcgacgttaagctgcgcggcgagacggtggatctgacgccgcgcgagttcgacctgctctactactttgcccgccatccgggggaggtcttttcccgccttgagctgcttgatcgggtgtggggctatcagcacgacggctatgagcatacggtcaatacccatatcaaccgcctgcgcaccaaaattgagcgcgacccggcggagccggacatcattctgaccgtctggggaaaaggctataaatttgccgtggagcgcaaagaggcgcagccatgatccgccgtctcagcctcagccagcgcctggcgctggtgtttacctcactgctgctgctctgtgccatagccgtttgtctgatccagctgtacagcagcgcgcagtacggcaacgtcatggtccagcgtctctccgccgggctggcgcagcagatcgccgcccgcgagccgctgctggacgctcaggggcaggttgatcgccggatgctgaagccgctttttgatcggctgatgaccttcaatcccagcgtagagctgtatctgctttcgcccgacggcgagctgctggccgacgccgcgccgccggggcatattaagcgccagcgcatcgatctggcgccggtgcaaacgttcctgtccggcggcgcctggccggtgtacggcgacgatccgcgcagccttgataagcaaaaggtgtttagcgtggcgccgctgcgccaggacggccagctgcgcggctatctctacattatcctgcagggtgaaacctttaatgaactggcggcgagcgcctggcagaaaaccttgtggagcctgctgctgtggactctgctgctggtggccggtctcggcgggctggcgggctggcttgcctggttctgggtaacgcgcccggtgcgtcagctcaccgcgctggtggcaaccgacagccaggacagtattcatgcgataaaggcgctggcggcgcaaactccggaggcgaacccggggaatgaagtggccgtgctgcataatcgctttattgaactggctcgtcagattgccgggcagtgggaccgtctggccgacagcgatcgccagcggcgagaatttgtcgccaatatctcccacgatttacgcacgccgctcacctctttgctgggatatctggaaacgttaagcctgaaggccgatcgcctgacgatggaggagaacaagcagtatctgaatatcgccctgcgccaggggaacaaggtccgccatctttctcagcagctgtttgagctggctcgcctggagcacggagggattaagccgcagccggaaaccttcgtgctggctgagctggtgcaggatgtcgcgcaaaaattcgacctggcaatcgcgacgcgcaatatcggtctacggctggatctggccgccgggctaccgccgataacggcggatctctcgatgattgaacgggtgctgactaatctgctcgataacgccattcgccatacgccggaaggtgggcttatccgcctgacggcgcgtcgctcagggccggaatttatcgtcgaggtggccgatagcggaccgggcgttgccggtgagctgcgggcaacattgttcgaacggccttcggtgcttgaacctggcgcgcaaagcgcatcacgagggggactggggttgatgattgtgcgacggatgctgcagctgcacggcggcgatattcgcctgcttgaagcgccggcaggggcctgtttccagtttaccctgccggtttaaggtggcggattggccgatcgggcggtctatcgccgcctgctaaacggtagcccgggtaaggtgtttacgccgcaacccgggaaatgcgcctgggttgaggctttagtgcggcttcttcccgggccgcgctgcgcttgcccgggctacggcgactgtctgcgggccggtgcccgggtaaggcgtttacgccgcagcccgggaaatgcgccgggattgaggctttggtgcggcttcgtcccgggccgcgctgcgcttgcccgggctacggggccacggctgtctgcggaccgatagcccgggtaaggcgtttacgccgcagcccgggtagtgcgccgggattgaggctttagtgcggcttcgtcccgggccgcgctgcgcttgccccggctacggcgactgtctgcggaccggtagcccgggtaaggcgtttacgccgcaacccgggaaatgcgccgggattgaggctttggtgcggcttcgtcccgggccgcgctgcgcttgcccgggctacggggccacggctgtctgcgggccggtagcccgggtaaggcgtttacgccgcaacccggggaatgcgccggggttgaggctttggtgcggcttcttcccgggccgcgctgcgcttgcccgggctccggggccacggctgtctgcgggccggtagcccggacaggcgcgtcaagcgccgcctccgggaaatgcttactccgggaaccactgcttgctgattttctcgtaggtgccgtcggctttaatcgccttcagcgcggcgttcagtttttccagcagcgctttgttatccgggcgtaccgcaatgccgaggccggtaccgaagtactgcgcgtcggtgactttcggcgttgccgcgcccagctgtgggttggttttcagccactcgttgaccacggcggtatcgccaaacaccccatcaatacggccatttttcaggtcgataaacgcattctggtagctatcgtaagccacggttttcacttccggatgtttatcctgcaggtatttctggtgcgtggtgccgttttccatcccgatacgtttgcctttcagatcggcgaaagagtggaaggcatctttcttcgagataaccagcgcggagttagcgtagtacgggtcggtaaacgccacctgcttgctgcgctccggggtaatgtccatgccggagatgaccgcatcatatttcttgaatttgagcgccgggatcaggctgtcgaaggcatggttggtgaacgtacactcagcctgcatctgcttacacagcgcgtttgccagatcgatgtcgaaaccagcgatctggttattggcgtccatcgattcaaacggtgggtaagttgcagaaacgccaaagctgattttttctgcggcagcggcgccaaaggcgaaagtgctaagcagtgcggccagaactaactttttcattgtggaactcccgtcggtcaatcttatgatgttgtgccgtgtctgcggctgggagtaacaatgccactaaatgaatttatattcaataatcatggatagttattttaattgaaataaaaaaagacggataactcagtgagcttatccgtctttatttggctttttatgcgtttttaattacgtcgctcaaaggccagcgctttatgttccaccaggcgcatcagcagcgtcagcaggccattgaccaccagatagacaatgccggcggcgccgaacaccatcacatcataggtacgtccatagagcagctggctgtggcccatcacttccatcagggtaatggtgtaggccagagacgtactcttgaacaccagcaccacttcgttggagtaggaggagagggcgcgtttaaaggcgtacggcagcaggatcgccagcgtatctttcttactcattcccagcgcgccgcaggattgccactggccatccgggatggcgcgaatggcgccataaaacagctgcgtggtataagcggcgctgttgagagaaagggcgatcagcgcgcagagccagggttcggaaatcagatgccagagtaccggatattcctgcagcgacgggaactgtcccgggccgtagtaaatcaggaagatctgcaccagcagcggcgtgccggtaaacagcgtgatatagccgcgcacgatccacaccagccccggcgtttttagcgtcagaatgatggtgaagatcagcgacagaatcagcgccacgacgatagaggctgcggtcagcgtcaggctggtatgcagcccttttagcagttcgggtaagtaatcaagcatcagcctggtctccgttcgaagcgcgtcgcacgctggtcaatacgtttcagaatgtactgactcaacagggtgatgaccagatagattgccgccgcgatgatataccagttaaacggctcctgggttcgggtggcgatgcttttagtttgcagcatcagatcgttgacgctgatcaggctcaccagcgcggtatccttcagcagcaccagccactggttgccgagtcccggcagcgcgtggcgccacatttgcggcatcactaagcgaaagaaaatagcggctttcgataatcccagcgcctgaccggattcccattgcccctgcggaacggctttaagcgctccgcgcagggtctgcgatgcgtaagcggcatacagcagagaaagcgcgatagccccgcagaggaacggactgacgtcgaagttttcaatctgcatctgtaccgggatctgcactatgccgagattgatcgtaaaaccatcagaaagggtcagcagcagctgtgaggaaccaaaatagataaacagaaccaccagaatttccggtagtccgcgcaaaagggtgacaatgccggttgcgagccaggcgaccggacgcagctttaccgactcgaggacggcaaagagcatcgccagcaccaggccgatgatcagggcgcaaacggcaaggccgacggtcatcccggcggcgcttgctaatggaaaaaattcgttcattcagcgttacttctggaaccatttgttatagatagactggtaagtcccatcgcttttcactttttccagcgcagcgttaaatttctgctgcagttcggtattgccctggcgcagcgcaatgccgagaccggtgccgaagtagtctttatcggtcaccttgtcgcccaccgcggccagcttcggattgctcttcagccattcggtcaccacggcggtatcgccgaatacggcatcaatacggccgttctgcaggtccagcttcgcattctggtagctgtcgtaaggaacggtcgtgatttccgggtgtttgtcggtgatgaatttctggtgagtggtgccgttctgcacgccgacttttttgcctttcagggcgtcaatgctggtgaatttaccctgctggccgacgaacagcgcggagttttcatagtacggggtggtgaacagcacctgtttttcacgctcaggagtgatgtccatcccggccatgaccgcgtcgaaacggcggaacttcaggctggggatcaggctatcgaaagcctggttggtaaaggtgcaggtggcatcaatctctttacacagcgcgttcgccagatcgacatcaaagccgacaattttgttattggcatcgatcgattcaaacggagggtaggaggcctcggtggcgaaacgaatggtctgggctgcggtagcggagaggctcatgcccgcaagaagagcggcaatcagtacttttttcatcgtcatttccccgaaaacatcaatgtgaaagatagtttttaaacgcgtcggtctgcggatgcgcgaagcagccggcatcaccttgttcaacgatatggccattttccatatagaccacgcggctggctgttttgcgcgccacttccacttcgtgggtgacgataacctgcgtaataccggtttcagccagttcgcggataatactgacgatctgggcggtgatttctggatcgagcgccgccgtgggttcatcgaacagcagaacctgcggttccatcatcagggcgcgggcaatagcgacgcgctgctgctggccgccggaaagatgcagcgggtagcgatcgctatagggtttcaggcgcagacgttcgagcagcttttcagcgcgggctaaagcctgatctttgctcaaaccgagcacgcggcagggagcttcaatcagattttgctgcacggtcagatgcggccacagattgtactgttggaacaccatacccacgttctggcgcagctcgcgaatggctttgtcagaaggcgctttggtaaagtcgaaatgatttccagcgatatgcagcgtaccggaacgcggcatctccagcagattgaggacgcgcagcagcgagcttttaccggcaccgcttgggccgagcagcaccagcgtttccccctgcgggcaatccagcgtgatgtcgaacagcgcctggtgtgcgccgtagaagcaattaatgccgtttaattttatgctcatctgggcagtctgatacatatagcaattgaggccgcaaatagtacctttggcagaatagttatgcaatatttatgcgttaaaagttaaatgtaaaccatgtttacatttaaagttagcacaaaatatggcttcgtgaaggtgggataagtcaatgtcggcattaccagcggaaatgccgacattttaccggggttatttcattcggcccgagcggcccaacgcctgaattagcgtttttccagactctgacgcagggtgcccgccggcgcatgggggttgttgccgaggtagcgtacgtcatccacggcccagcactggccttcctgaatcatcagcacttcgtctttccagctttgggtgccctgtttcagctccacgcgcaggggaatattgcgcgcgtcgcgattagggatggtggaggcgctggcgacatcggcgctgtcggctggcgttgggctactggagaaaagatttgactgcagcagggcgttgttagacgggtcctgacgcgcgtcgttcagcagttttgccagaccgtcgctcaggtatgggcgcagcgcggttaaatcgctgttgcggtgctgtacctggtagtcataaaacttctgcgctacgtcatccgggccgccttcgatgcaggggccgctgcgggtgccgttatctttgtacgcaggcgtgacggtagtacaggcgctgagcgccagcgcgcaggggaggactaatgcaagaactttgtagcgcatgatgatttccttatgagctcactacgttagaatatcttttcaagcatagtgtatcagatagggattgtgcttgacccttagagctaacgcattgaacgctaaagaaggagtttcatcatgcaattttccaccactccgaccctcgaaggtcagcccatcattgaatactgcggcgtcgtcacgggggaagcgattctgggcgccaacgtattccgcgattttttcgccagcatccgcgatatcgtcggcggtcgttccggcgcctatgaaaaggagctgcgtaaggcccgtgaaattgcgtttgaagagctgagcgagcaggcgaaggcgctgggcgccaatgcggtggtcgggattgatattgactacgaaaccgtcggtaaagatagcagcatgctgatggtcagcgttagcggcaccgcggtgaagacccgccgatgagaacttgccgggcaggcgtactgctggcgctgctgctggcgggctgcgccagcgaaaaaggtattatcgatcgcgatggctatcagctggatacgcgccatccggcgcaggcggcatatccgcgcatcaaagtgctggtgattcactacaccgccgacgatttcgacgtttcgctggcgacgctgacggataaccaggtgagctctcactacctgatcccggagaaaccgccgctgcacggaggtaaaccgcggatctggcagctggtgccggaagaggaactggcctggcatgcgggcgtcagcttctggcgcggcagcacgcgcattaacgacacttcgattggcatcgagctggagaaccgcggctggcaaaaaacggcgggggtgaaaagctttacgccgtttaatccggcgcagattgacgccctgatcccgctggcgaaagatattatcgcccgctaccacatcgcgccgcagaacgtggtcgcccatgcggatatcgcgccgcagcgcaaagacgatccggggccgctgttcccgtggcgcaggctggccgagcaggggattggcgcatggcctgatgcccggcgcgtggcattttatctgcagggccgtccgtcatacgagccggtagacgccgcagcgctgctggacgtcctggcgcgctacggctatcaggtgacgccggaaatgacgccagcgcagcagaagcgggtcattatggctttccagatgcacttccgtcccgcgcgctgggacggggttgccgatgcgcaaaccctggcgatagccgaagcgctgctggaaaagtacgggcgtggttaatagtgcagcttgccgtggtccttcaaccacgcggcggtgcggagtatcccttcatccatcgtgatgaccggctgatagcctagctcctgctgggcgcgggagatatcaagagtaaaatcaaagttcagcttagagacgccgtagtgggtaaatgcgggctctttcgctgacttattgccaaagcgctccatgctgcgggcgatgatatccagcatgggatagggaaccgaacggatgcggcacttaatccccagctcgtctatgagtttctgcacaatgctgtgcagggtttgcggttcgccgttagtaatgttgtacgcgcgggccgagggcagaaggtcactctgcggctggctggcgagccacatcgcgtgtaccgcgttttcatagtaggtcatatccaccagcgcgctgccgccgcgcggcaacaggacgctgccgtagtgctgcatcatctgcgccaggcgcgggataaacactttatcatgcgggccaaacaggctttgcgggcgcaggattgtaaaacgggtatttgggttggcctgcgccagcagattgatcacatcttcgcttgccgccttgctgcgggcgaattcgttggcgaaacgctgcgggcggaaatcctccgcaacatcgcgatgatggtgataatcaaaatagagcgacggcgaagagatatgcacgaagttgcgcacgccccaggcaaccgcccactcgccgagacgccgggtcgcgcgcacgttagctaaatcgaaggcctgctgggtgccccacggcgaggtaaagctggaacagtgccacagggtatcgataccggcgagcatcactttggcctgcgaagagaccagctcggttaagtccgcagggacgaactctgcgcccattttgctcagaagcttgcccatcgcttcgttgcgcccggtcgctctgacgctaatgcccttgttacgcagatattctaccgcgttgcggcccaatccgctggtcgcaccggtaaccagtaccttcatatcgatccactgtttaacaaaagaatttcgtgcgcatttttccgtgattctgactacgatgcaatgagaatcatgaaagaattctgcacctatactctatttgatggtgatttgctccgccaggtgggcgatgcgtcgcgccataccgcgaaaaataaacagatgcgccgggatcatcaacagccagtagaaaagccccggcataccgtgcgggtgccaccaggctcgcacgtccagttcgcgatgatcgcctttatcgcgcagggtaaagctcaggcggccaaggccgggcgctttcatgccgaataacagcgtcagctgcttttccggctcgacgataatcaccttccagctgtccaccgcatcgccggtctgcagatattcattttccgggcgaccttttgccagccggtgaccgaccagcagatccatcgccccgcgcgttttccacagagcgttgccgaagaaatagccctctttgccgccaatttggttgactaccttccacagcgcagcaaggctggcggaagtgttaacggtacagcctgcctgtttcggatagtagccgtactcgggccgccagcgggcgaaggcctgcgcatcgtagccccagtcgctggagttcaccagctgctcctcttctttaagcgtaagccgcaccgcttcatcaaacgcgataagcggttgaggaattaaggcccgcagggcccgatcgtcggcaatcagatcgtgctttagcccctggatcagcgctttggccgtggttggcggcactgaggtaatgacgttgagaaaccacaccgaaatccagcgggtcgggaaagggatggggatcagcgggcggcgtttgccgctgaccgccataaagtggatgaactgctgctgatagctcaaaatttccggtccggcggcttcaaacacccgatgctcgcgggccggatggtttagcagctgcagcagatagtagagtaaattttccagcgcaatcggcgtggtgcgcgagcgcacccagcgcggcggcgtcagcaccggcaggttgtagaccatatcgcgcatcacttcgaaggcggcggaaccggcgccgacgataatgccggcgcgaacttccgctaccggaacgcctgattcgcgcagcagatcgccggtgatctggcgggcgcgcagatgatcggattgctcctgcttctccacctgtaaggaactgagaaagatgacttcgttcaccggcgacttgcgcagcgcgtcgcgaacgttgagggcgacccgccgttcgtggcggataaagtccccgccttcgcccatcccgtgcaccagatagtaaacggtatcagcctgcgccagcagggcgggtagcgcgtccggctggtttaaatcgagcgaatagcactcgacgccggggagctgctgttttttaagcctgtcgatgtggcgtgccgccgccagcacggtgaagccctgctcgctgagccttttcaccagatgctggccgatataaccgctggcgccaagcaccagaattcgctgcgacacgccggactccttaacggtttaaaaatgcctgccagtggctaaccacctcggtgagctgctggcggttaacgtcaatatgcgtcaccaggcgcacgatgggcgaggcgttgatcagcacccctcgttcgcgcagatactcgcccagcgcggcggcgcgcgcttcaccgacgcgaacaaacagcatattggtatcatgacgcgtcacctcggcgccggcggcgcgcagctgctccgccatccacgcggcgttgtcgtgatcctcttttaagcgcgcgacgttgttctgcagggcatacaggcccgcggccgccagaataccggcctgacgcatcccgccgccgaccattttccgccagcggatagcgcggtgaatgtactcttcgctccccaccagcagcgagcctaccggcgcgccgagtcctttagacaggcagatggtgaaggagtcgcagtagcgggcgatctcgcgcagcgcgcagccgtattccacgacggcgttaaaaatacgcgccccgtcaacgtgcagccccaggccgcgctggcgcgtaaactcccaggcatctttgagatattcacgcggcagcactttgccgttatgggtgttttccagcgacagcagccgggtaggggcgaaatggatatcgtccggtttgattttggccgcgactttatccagcggcagggaaccgtccgctgcggcatcgattggctgcggctggatgctgccaagcaccgccgcgccgccggcttcgtagagatagttatgcgcgccctggccgacgatatactcttcaccgcgctggcagtggctgagcagggcgaccaggttggcctgggtgccgctaggcaggaagatagcggcctctttgcccgccaggttggcggcaaagcgctggagttcgttaacggtcgggtcatcgccatacacgtcatccccgaccggggcggccatcatggcttccagcatggcgcggcccggacgggtaacggtatcgctgcgtaaatctatcatgtcatatccttatacacttcatccttcgcgctgccccggcgttggctgctccctcaaagcccggtcacagagttatctctgcgcccgggggttttcggccttgccgccttgaggcaacacgaataattttgcgtatgaattgaaaaggatatttttaccttagccagttagttttcgccagttcgataacttcgtcgccgcggccgctgataatcgcgcgcagcatataaaggctgaaacctttggcctgctccagtttaatttgcggcggcatcgccagctcttcactggcgacgaccacatccaccaggaccggaccatcggtagcgaaagcggtttgcagcgcttcatcaacctctgacgcgctttcaacacgtatgcccttaatgccgcacgcttcggcgatgcgggcaaagttggtggcgtgaagttcagtgccgtctgtcagatagcccccggccttcatctccatcgccacgaagcccagtacgctgttattgaagataacgatcttcaccggcagcttcatctgcgccagcgagagaaaatcccccatcagcatgctgaagccgccgtcgccgcacattgccacaacctgacggtcaggggcggtggccttcgcaccgatggcctgcggcatggcgttagccattgacccatggttgaacgatccgagcaggcggcgcttaccgttcatctgcaaatagcgcgcggcccagacggtcggcgtacccacgtcacaggtaaagatggcatcgtcgtcggcatagtggctgatgcgctgcgccagatactgcggatgaattgttttttcgctgggcttcgccaggtcatcaagccccttgcgcgcgtcgcgatagtgttccagcgctttatcgaggaacttacggtcggttttctcctcaagatgcggcatcagcgcgctgagggtcgatttaatatcgccgaccagcgccatatccactttactgtgggcgccaatactgccgggattgatatcaatctgaatgattttcgcgtccgtcgggtagaaggcgcggtaggggaactgggtaccgagcagcaccagggtatcggcgttcatcatggtgtggaagccggaggagaagccaatcagcccggtcatccccacatcataagggttgtcgtattctacgtgctctttgccgcgcagcgcgtgaacgataggcgctttgagcttcgcggcgaagtctaccagctctttatgcgccccggcgcagccgctgccgcacatcagggcgatgttgcttgaatagcgcagcagctgggccagctttttcaactcttcttccgccggcgtcacctgcggcagcggcgcgtggtaccagtggctgctggcgctttccggcgcggctttcagcgcaacgtcgccgggaagcaccactaccgagacgccgcggttaatcaccgctttgcgcatggcgatggccagcacctgcgggatctgttccggggtggagaccagttcacagtagtgactgcattcccggaacagctcctgcggatgcgtttcctgaaaatagccgctgccgatttcgctggaaggaatatgggcggcgatggccagaaccggaacgtgattgcggtggcagtcgaaaaggccgttaatcagatgcaggttgcccggcccgcaggagcctgcgcagaccgccagttcgccggtaagctgcgcttccgccccggcggcgaaggcggccacttcttcatggcgcgtgggcatccagtcgatggtccccatacggttcaggctgtcgcttaagccgttgagcgaatccccggttacgccccaaatacgtttaacgccagcctgttcaagagttttggcaatgtatgccgccacggtctgtttcatggttctccatctcctttttgtgataacgcttacaagcttagatgaaactgccagttacgctcgctttaacctctcattttccgctggtttttttcagtgaaaactccgcataatctgagctcacataaagtggtaaacaggaatcatttcaaatggttaaatcgctgttaaatgctgttaataaactgctatcccatgacgatttcggcaaactcttgttacgacttgccgttggcgggctgatgctgtttcacgggttgcataagctatttgatggcgtagggggaatcagcaatatgctggtagcaaaaggattgccggggtttatcgcttatggggttttagtgggcgaggtggtagcgccttgcctgctgattctgggagtgcttacgcgtccggcggcgctggtgctggcgtttacgatggtcgtggcctggctgatggtcgggacgggcaaaacctttgcgctggatgcggtaggcgcgtgggcgattgagagcctggtctatttctttgttggcgcgctggcgattgccttcctcggggcagggcgctatgccatcggcggcaattcggcctggcggtaaacattgccggacggcgttgcgccatccggcagctgagggttaagccagtaccaaatcaccctgcgggtggcaggagcaggccagcacgtagccttcagcgatttccgcatcggttaacgtcatggtactgctgacggtatattctccggaaaccactttggttttgcagcagccgcagacgcctgcgcgacaggcgacggtaaccggcaccttattgctttccagcgcttcgagcagcgtggtgccgaccggcgcgtagaacgctttcgccggctgcagtttggtgaacttcaggccgctggtagcggcttccgctaccggcgtaaagaactgctctttaaagaaacgcgtcgcgcccagcgctttcacctcctgctcaacccaatccatatacggcgccgggccgcaggtcatcacggtacgagaggtcagatccggtacgcttttcagcagatcggtcgtcagtcggccagaaacaaaaccgtgggtggcattgttttcagcgactaaggtcaccggatattcgcgccattcgtcggcaaaaataacatcttgcggtgaacgaacgttaaagatcacctgcacatcggcctgcgggcggtactttgccaaccagcgacgcattgacatgattggcgtaacgccgcagccagcagccagcatcaggaacttatcttcagccttatcttcacaggtaaattcacccatggcatcggacagccagatatagtcgccgcgcttcacgtcgcgggtcagccactgtgagcctgcgccatcgtcaatccgacggatggtcagcgtgatgtactcgcttactcccggcgtcgatgaaatggtgtaagcacgcagcgtctccgctgaattacgtacgctgaccagtgcatactgcccggcacggtacggataatagtcgtggcacagcaacgaaattgtccatacatccggcgtttcctgatggatgtgatgaacctgcatccgccatgggcactgatgagttggcattgtcattctttactccttacgcgctcagcagctgcttcatgtcttcttcaacggtggtcacggaacgcagaccgaatttctcgttgagaacggccagcaggtccggcgtgaagaagcccggcgccgtcgggccggtgacgatatttttcacgcccagcgacagcagggtcagcagaataacaatcgctttctgttcaaaccaggagagcaccagagacagcggcaggtcgttcacgccacagctcagtttctcagccagggtgaccgccaggatgatggcagagtaagcgtcgttacactgaccggcatcgaccagacgcggcagaccttcgatatcgccgaattcgagtttgttgaaacggtatttaccgcaggccagggtcaggatcaggcagtcgtccggtacgctggtggcgaaatcggtgaagtagttacgttcgccgcgcgccccgtcgcagccgcccaccaggaagatatggcgcagtttttcacggctcaccaggtcgattagcgtatcagccgcgcccagcagggtctgacgaccgaagccaacggtgatcaggtgcgggatctcgctgtacgggaagcccgccatctgctgcgcctgggcgataaccggggcgaaatcttcgccttccagatgattgacgcctggccagccgacgatgctgcgggtccagatacggtcgtcataggcgccgacggttgggtcgatgatgcagttagaggtcatcacaatcgggccagggaagcgggcaaactcaacctgctggttttgccagccgctgccgtagttaccaatcagatgcttgaatttacgcagttccgggtaaccgtgcgctggcagcatttcaccgtgggtgtagacgttaaccccggtaccttcggtttgctccagcaggttgtacagatctttcaggtcatggccggaaatcagaatgcatttgccttcggtcgctttgacgttgacctgagtcggggtggggtgaccatatttggtggtctcgccagcgtccagaatgctcatcactttgaagttcatctggccgatttccatcgagcactccagcagcgcgttcatatcggcaggccaggtaccgagccacgccatgattttatggtactgggcgtagatgttgttgtcgtactgacccagaacgtgcgcgtgctccatataagccgcagcgcctttaaggccgtacaggcacagcaggcgcaggccgagaatgttctcgccgatggccgctttgtctttgttcggggtgaattccgccgcctggcgctgcaggtcgcccagatcgtcgctcgccagctgcagatcggccatcgggttgttaaccgtcgcgtgggcatcaatgttcaggcactgggctttcagcgcttcacgcagggtgatggcctcgcgcgcatagccaacgatacgcggggaatcgaagttaacgttggtcagcgtggagaaaaaagcgcgcggcgtaaagctgtcgatgtcgtggtcgatgatgccgtattcacgggctttaagcgcccaggcggagagcccctgcagagaggcaatcagcagatcctgcagatcggacgtttcggccgtttttccgcacataccctgcgcgtaagagcagccgttccctgccggggtacggatggtttgttcacattgcacacaaaacatggtcacacctttttaaagttatatttaatatacatgtttaaggttatgcccgagcgcgagaagagaaaaggtatttctgatacaacttacggggagattgatttagcgcaaaattggcggcagaagactaccgccagagaggtattaagcggagaagaaagccatcaatatgggcaccagcagactgagaatgaagccatgaacgatggccgccggcacaatctccaccccgccagagcgttgcagtaccggcagcgtaaagtccattgatgtcgcgccgcaaaggcccagcgcggtggaacggctgcggcgcaccagtccggggataagcattatcgccagcagctcgcgggcaagatcgttaaagaaggccgcgctgccaattaccgggccataggattcggtcagcagaatcccggagagcgaataccagccaaacccggaagccatggccagcccggtttttagcggcaggtcgagaataaaggcgttgatgataccgcccagcagtgaactgaccatgaccactaccgcgacaatcattccgcggcgattcagtacgatctgccgcagcgtcatgccattattgcgcagttgaataccgatgaggaacaaaaggaagatcagggtatattcgctggcctcggtggcgtgttgtaaaaaggatataccgctcagaccaatcataaaaccaataaataccacgccgcatagctgaagggattccagagccattgccagacgggagggtaatttttcctgacgatgatgatttttccagggcattttttgctcgagccacatcagggcggcaatattgcatagcagaataataacgacgctgaccgccgcataatgaaggatcgccaggaggttgctggccagattatccaggaaggccaggctaatgcccataaaaaagagaataacgtagacaatccagctcagaagtcgcgcgatgagtttaagggctgatggccgatgaagaggaataagatagcctataaccaacggcagcagaatgattaaaagtcccgaaaacatgaacgacctggtccttgcagaatgaaaacagcgcccctgacactacccaaatcgccggactgagtaaagtggtggaaaaaaagaaaggcccggcagcaccgggcctcaagaaaagtggaggaagtttagctgcgtttttccagcagggtgcggtagagcacgccgccgagaatgccgccgataatcggcatcacccagaatagccacagctgctgcagcgcccagccgccctggaatatcgctaccgcggtactgcgcgccgggtttaccgacgtgttggtgaccggaatgctgatcaggtggataagcgttagcgccaggccaatagcgacaggagcgaagccggccggtgcgtttttatccgtggcgccgtgaatgaccagcaggaagccgcaggtcaggacgatctcaatcacaatagcggagagcatggagaaaccgccgggagaatgttcgccatagccgttcgatgcgaatccgctagcggcggcgtcaaagcccgctttaccgctggcgacaacgtacagaatagcggcggcgataataccgccgacaacctgggcgataatataaccaatcacgtccctggccgggaaacgaccgccggcccataaacctaaagttaccgccgggttaaagtgcccgccggaaatatgaccgacggcatacgccatggttaatacggttaaaccgaaagccagcgcgacgccggcaaaaccaattcccagctcagggaatgccgcagccagaacggcgctgccgcaaccaccaaataccagccagaatgtaccaaagcattctgctgctaattttctaaacataaccacctcaataaaaacgtaaacgcgcacgagttttcgtgccggcctttattttcgccacaaagaatgacgaccagaataaagcgacgctattctatggacgatcgccaccttgggaccagttaaataaattgatgtaatttgatttagaacaatgcgcggggattccttttcatgtcggtttttttaaaagtgtagaacaaaaacggttaaaaaaacgactttcaatgatgaaggcgtttctcaattaagtgatgtacggctcatcacattcccccctgcggccatgagcgattcgcagacgcccggagtgtcatgttgatgctcacctcgctatactgctgataactgaaggagatagtcgccactgagcggagggcatatgcatcttgagcgtgtagaaatagtcggttttcgcggcattaaccgattatcgttgatgctggaacaaaataacgtgctgattggcgaaaatgcctggggtaaatccagcctgctggatgccctgacgctgctcctgtcgccggagttcgacctctatcattttgttcgggaagatttttggtttccgcccggcgatattcaggggcgcgagcatcatctgcatatcatcctgaccttccgtgaaaatgaacccgggcgccatcgggttcgacgctatcgtcctctcagcagctgctgggttccctgcgacgatggctatcagcgcgttttctatcgcctggagggggagcttgccgatgacgacagcgtgatgaccctgcgcagctttattgatggtgaagggaaagcgctggagcttgacgatattgatgaactcgcccgtcacctggtacggctgatgccggttctgcggctacgcgacgcccgctttatgcggcggatccacaacggcaccgttccgcactcgccgcagatcgaaattaccgctcgccagcttgatttcctctctcgcgaactggtacatcatccgcaaaatttaaccgatggacagatccgccaggggctgtcggctatggtgcaattgctggagcactattttgccgagcagagcagcgcgcagtcgcgccatcgtctgatgcgccgtcattcacatgatgaacagcgcagctggcgttacctggatattatcaacaggatgatcgacaagcccggcgggcgcagccatcgggtgattttattggggctgttttcgactctgctgcaggcgaaaggcacggtaagactcgatcgcgatgcgcggccgctcttgttgattgaggacccggaaacccggctgcatcctattatgctgtcggtggcctggcatttgctcaatttactgccgctgcagcgggtgacgacaacgaactccggcgaactgctgtcattaacgcccgtcgagcacgtctgtcggctggtgcgtgaatcttcacgggtgtcggcctggcggctggggcccggcgggatgaatgcggaagacagccggcgcatcgcgtttcatattcgctttaaccgcgcttcatcgctgtttgcccgctgctggctgctggtggagggggagacggaaacctgggttatcaacgagctggcccgccagtgcggccatcactttgatgcggaaggggtgaaggtcattgagtttgcccagtcgggtttgaagccgctgattaaattcgcccggcgaatgggtattgagtggcatgtgctggtggatggcgatgaagccgggaagaaatacgccgccaccgttcgcagtttgttgaatgacgataaaatgctggagcgagaccatctcaccgcgctaccggcgatggatatggagcattttatgtaccgtcagggcttcgacgatgtttatcaccgggtcgcgcagctgccgatgaatatacccatgaatatgcggcgggtgatcaccaaagcgattcaccgttcgtcaaaaccggacctggcgattgaagtggcgatggaggccggacggcgcggggttgacgccattcctgcgctgttgaaaaaaatgttctctcgcgtactatggctggcgcgcggacgcgcagattagcgcagaccgctgtttctctctttctgccgggcgatccatcccggcaggtcttcatctgcacaccctcaacttcagttaaacaaaaatgaagcgcatctaaaaatgcgcgttattctattgccgcatttagatagaattgtcgcgggttctgcgggttaaaacatcaggaattgttatgaaattaaatggaaagcgcaggaaagtttggtggctgctggcgattgtcgtgctggccctcgccgtctggggatggcgaattctgaatgcgccgctgccgcagtatcagacgctggtggtgcgtaaaggcgaccttcaacagagcgtgctggcgaccggtaagctcgatgcgttgaaaaaagtggacgtcggggcgcaggtgagcgggcagctaaaaacgctgcgcgtcgagattggcgacaaagtgaaaaaagaccagctgctgggggttatcgacccggagcaggcggaaaaccagataaaggaagtcgaagcgacgttgatggagctacgggcgcagctgaaccaggcgcgcgcggaacgtaaactgtctgcggcgacgctggctcgtcagcagcagctggcgcagcggcagctggtctctcgccaggacctcgataccgccgcgaccgacttagcagtcaaagaggcgcaaatcggcacgattgaagcccaggtcaaacgcaatcaggcgaccctggatacggccaaaaccaacctcgactacaccaaaattctggcgccgatgtccggagaagtgacgcaaatcaccaccctgcaggggcagacggtgattgctgcccagcaggcgccgaatattttgaccctggccgatctcagcaccatgctggtgaaggcgcaggtctcggaagcggacgtcattcatcttaagccggggcaaaaggcctggtttaccgtactgggcgatccgctgacgcgctatgaaggaacgctgaaggatattctcccgacgcccgaaaaggtcaatgacgctattttctactacgcccgttttgaagtgccgaacccgcagggcatcctgcgcctggagatgaccgcccaggtgcatattcagctctcagaagtgaaaaatgttatcaccatcccgctgagcgcgctgggtgaggccatcggcgataaccgctatcacgtgcgtctgctgcgtaccggtgaagttaaagagcgtgaaatcgttatcggcgcgcgtaacgacaccgatgtggcggtggtgaaagggctggacgagggggatgaagtcattatcggcgaaggtgcggccggagcggcgaaatgacggcgttactggaactgcgtgatattcgccgcagctacccctccggcgatggcaacgttgaggtgctgaaaggcattacgttgaacattgccgccggtgagatggtggcaatcgtcggcgcgtccggctccgggaaatccacgttgatgaatattctcggctgtctggacaaaccgaccggcggtacctaccgggtcgcgggaacggacgtggctcgcctcaacggcgacgagctggcgcgcctgcggcgggaacatttcggttttattttccagcgctatcacctgttatcgcatctcaccgcggcgcagaacgtggaagtccctgcggtttatgccggcgccgagcgcaaagcgcgcctggcccgggcccatgagctgctggttcggctggggctgggcgacagagctgaatatcagccttcgcagctctccggcggccagcagcagcgggtgagtatcgcccgcgcgctgatgaacggcggggaagtgattctggcggatgagccaaccggtgcgctggacagccgctccggcgaagaggtcatggggatacttcaccagctaaaagcgcaggggcatacggtgattatcgtcacccatgatccgcaggtggcggcccaggcggagcgggtgattgagatacacgacggtgaaatcgtgcgtaatccgcccgctctgagtccggcgcaaggcggcgtactgcgccagcgcacggcggccgaaccgtcggcgtggcgtcagttcagcagcggctttcgcgaagcgctgatcatggcctggcgcgcgatggcggcgaataaaatgcgtacgctgctgacgatgctcgggattattatcggcatcgcatctgtggtgtcgattgtggtggtgggcgatgccgcgaagcagatggtgctggccgatatccgcgccatcggcaccaataccattgatgtatatcccggcaaggatttcggcgatgacgatccccgctatcagcaatcgctcaagtacgatgacctgttagctattcagaaacagccgtgggtgagctcggcgaccccggcggtatcaaaaagcctgcgcctgcgggcggataacatcgacgttgccgccagcgccgagggcgtgggggcgcagtactttaacgtctacggcatgacctttagcgaaggcaatacctttaacgagcttcagctaaatagccgcgcgcaggtggtggtgctcgacagcaacgcgcgccgacagctatttccgcacaaagcgcgggtcgtcggcgaagtgattctggtcggcaatatgcccgcgacggtgatcggcgtggcggatgaaaaacagacaatgttcggcagcagcaaaattctgcgcgtctggttgccctataccacgatggctggccgggtgatggggcaatcgtggctgaattccatcaccgtgcgcgtcaatgaaggctacgacagcgcggttgccgagcagcagctgttgcgtctactggaactgcgtcacggtaagaaagatgttttcacctggaatatggacagcatcttgaaaacggcagaacggaccacacatacattacagctgtttctgacgctggtggcggtgattgcgctggtggtcggcggtattggcgtgatgaatattatgctggtctcagtcaccgaacgcacgcgggagatcggtatccgtatggcggtcggggcgcgggccagcgatgtcttacagcagtttttgatcgaggcggtgctggtttgcctggttggcggggcgctgggcgtcacgctttcgctgctgattgcctttgtgttacagctgtttttacccggctgggagatcggtttttcaccgttggcgctattgaccgcgtttttatgctccacgctgaccggggtgctgtttggctggctaccggcgcgcaatgcggctcgtctggaccccgtcgacgccctggcgcgcgagtagcgataaaaaaatgccagtcagaaggactggcattttgctggcgggatgtacacaatgaagcaaaagagttatgcggctgtttctgtttcttcagcttcaacagggacaatcacgctggcgtggttaccttttggcccctggtgaacatcaaaccgaaccgcttgtccggcttttagcgttctgtaaccatccatctggatggtcgagtaatgggcgaaaatgtcttcgccgccgccctcagggcagataaaaccgaaccctttggcattgttgaaccacttaacagtacccatttccatacttcgacatccttcgtaaatcttataagtaagatggaatgaaccggtagtggagtgacgagttgttcatttgctcgccaactctcgccactacaatttagagaaatcaggaaatgcgtcaagcgattgacgccaggggacggtgaaaaatgcgtcaaaatttgaagcagttaacgctattgccggggaatgtgacagacgtcgcggatggaagtaatagatgataattatctatgatctattgtagatttgtgatgtgcatagcctctggtcatcgacaggccaccgcctgttggcaacagcaaccgatgatgaacactgacgatgagtaagagagactggttggacttcgatcagctaattgaggacgaagttaaagatgcgcttaaaccgccatctatgtataaagtgatattagtcaatgatgactacactccaatggagtttgttattgacgtgttacaaaaattcttttcttatgatgttgaacgtgcaacgcaactgatgctgacggttcactatcaaggtaaagcgatttgcggggtgtttaccgcagaagtcgcagaaaccaaagtatcgatggtgaaccagtatgcgagggagaacgaacatccgttgttgtgtacgctagaaaaagcctgaatgcaggcaataaacttgggggaggtgcctatgctcaatcaagaactggaactcagtttaaacatggctttcgccagagcgcgcgagcaccgtcatgagttcatgaccgtcgagcacttgttgctggcgctgcttagcaacccttcggcccgcgaagcgcttgaagcgtgttcagtggacctggtcgcgctgcgtcaggagcttgaagccttcatcgaacagaccacacccgtactgcctgcaacggaagaagagcgcgacactcagccgacgctgagcttccagcgcgtgctgcaacgtgctgttttccacgtccagtcttccggccgcagcgaagtgaccggcgccaacgttctggtcgcgatttttagcgaacaggaatctcaggcggcatacctgctgcgtaaacatgaagtcagccgacttgatgtggtgaatttcatctctcacggtacgcgtaaagacgagccgagccagtcttccgataacagcggaagtcagcctggcagcagcgaagagcaagcaggcggggaggatcgtatggaaaacttcaccaccaacctcaaccagcttgcccgcgtaggcggtatcgatccgctgatcggccgcgagaaagagctggaacgtgctattcaggttctgtgccgccgccgcaagaacaacccgctgctggtgggggaatccggcgttggtaaaaccgctatcgctgaaggtcttgcctggcgtatcgtgcagggcgacgtgccggaagtgatggccgattgcactatctattcactggatattggctcgctgctggcaggtaccaaataccgcggcgactttgaaaaacgctttaaagcgctgcttaagcagctggagcaggacaccaacagtattctgttcatcgatgagatccacaccattatcggtgcgggggcggcttccggcgggcaggtcgatgccgctaacctgattaaaccgctgctttccagcggtaagattcgggtcattggctcgacgacctatcaggagttcagcaacatctttgaaaaagatcgtgccctggcgcggcgtttccagaaaattgatatcaccgaaccttccgtggaagagacggtgcagattattaacggcctgaagccgaagtatgaagcgcaccacgacgtccgttacaccgcgaaagcggtacgtgcggcggtagagctggcggtgaaatacattaacgatcgtcatctgccggataaggcgattgacgtgattgatgaagccggggcgcgtgcgcgcttgatgccggtgagcaaacgtaagaaaacggttaacgtggcggatattgagtccgtggtggcgcggattgcgcgtatacctgagaagagcgtttcccgcagcgatcgcgatacgctgaaaaacctcggcgatcgcctgaaaatgctggtcttcggccaggataaggcgattgaggccttaaccgaagcgatcaagatggcgcgcgccgggcttggccatgagcacaaacccgtcggctctttcctgtttgccgggcctaccggggtcggtaaaaccgaggttaccgtacagctggcgaagtcgctgggcattgagctgctgcgttttgatatgtccgaatatatggaacgtcataccgtcagccgcttaatcggtgcgcctccgggctacgtcggtttcgatcagggcgggctgctgaccgatgcggttattaagcatccgcacgcggtgctgctgctggatgaaattgaaaaagcgcatccggacgtctttaacctgctgctgcaggtgatggataacgggacgctgaccgacaacaacggccgcaaagcggatttccgcaacgtggtgctggtgatgaccaccaacgccggggtgcgtgaaaccgagcgtaaatccattggcctcatccatcaggacaacagtccggatgcgatggatgagatcaaaaagatctttacgccggagttccgtaaccgtctcgacaacattatctggttcgatcatctgtctacgacggttatccatcaggtggtggataaatttatcgtcgagctgcaggttcagctggatcagaaaggcgtctctttggaagtcagccaggaagcccgcgattggctggccgagaaaggctacgaccgggccatgggcgcgcgtccaatggcgcgggtgattcaggacaacctgaaaaaaccgctggccaatgagctgctgtttggctcactggttgacggcggacaggtgaccgttgaactggataaagagaaaaatgcgctgacctacgacttccagagtgcgcagaagcacaaaccggaagctgcgcattaagtttcggtactcagtgacaaaaccggcctcagggccggtttttttatgcctatgtcctggacccttttttattccactttttaacttgttgattttaataaagagaaaatatagcgtaaaattatggtggcagagaggatgtgttgattaatttcaatgataacaatatggtagggtgttgttcgttcagttcactgccgtacaggcagcttagaaatataactcggccacaggtcggcttatcctgaagttcactgccgtacaggcagcttagaaaatcaggcaaaacatttcctgcatgttcgcgatgttcactgccgtacaggcagcttagaaatgatccgcagattgtaccggcgtcgaccacaggttcactgccgtacaggcagcttagaaaagaccgattttatcagccagggggatgatcacgttcactgccgtacaggcagcttagaaaatgtactgtgccagcagctgaatgcggaaggggttcactgccgtacaggcagcttagaaagcagtgtcgcgttccagaaacagcctgattttgttcactgccgtacaggcagcttagaaaaatataaattgcctgaatttcttgcgcgtactgttcactgccgtacaggcagctcagaaaatttgccgaaaatgctgccgcagttgtatttggttcactgccgtacaggcagcttagaaaagtatcctaaagaaccgttgcggcggcggttggttcactgccgtacaggcagcttagaaatctacgtacagcagagtaaagcatgaagtcagagttcactgccgtacaggcagcttagaaattcctggtttcaccatctacagctttcacctggttcactgccgtacaggcagcttagaaattcagggatattcgcgatgtccgcctgagcaggttcactgccgtacaggcagcttagaaaacaagttgtaggcggccatcaggtagaattttgttcactgccgtacaggcagcttagaaaacaccaaaatggcttcatggctcattgagtgggttcactgccgtacaggcagcttagaaaatcagagtgccggcagctttatcgccggcacggttcactgccgtacaggcagcttagaaatcagagcggtgatttctgcgaaggttgtagatgttcactgccgtacaggcagcttagaaattacaggtgacatcgcacacccctgatacctcgttcactgccgtacaggcagcttagaaatgtggcagccgaacaaaaacggcgacgggattgttcactgccgtacaggcagcttagaaaagtgcagcaaaccagagaagggcgcgccggctgttcactgccgtacaggcagcttagaaaagaagaaaaggcagacccgatcaacgaagagagttcactgccgtacaggcagcttagaaagtattcggtccagtgcctgatggcgcggatgcgttcactgccgtacaggcagcttagaaacgccgcgaaactgggccacgccttcagctgctgttcactgccgtacaggcagcttagaaaaccaacaaactgcaggcagagcagaaagccgcgttcactgccgtgcaggcagcttagaaaatacgccgtgatgaactgaacggaatcccgatgttcactgccgtgcaggcagcttagaaaaaacttcgcgcggatttcagcgattttgtttagttcactgccgtgcaggcagcttagaaacgctactccgcaaaaatgaaattcgtgtgctggttcactgccgtacaggcagcttagaaaatgttgcggagaatccacagcctgttctcagtgttcactgccgtacaggcagcttagaaatgcacgaaatcaacgttgcccgctcggttgccgttcactgccgtacaggcagcttagaaaagagcttgcccacactgctgtgcaagccaaacgagtctaaagaaattgccaaagtaataggttattttgcaagttgcgatgaatgtcaccgtattgcatctaatatactgtttttataaacagctatcgactttgagccacaggatgtgactatgcccgcgaagtatattgccccctcggatttaaaaacgatactccattcaaaacgcgccaacatttactatctggaaaagtgtcgtgtgcaggttaatggggggagagtggagtatgttaccagtgaggggcatgagtcattctactggaatatcccaatagcaaatacaacggccattatgctaggaatgggaacctctgttagccaggcagcgatgcgtgagttcgcccgcgcgggtgtgatggtaggtttttgtggtacggatggcacacctttatatgccgccaatgaagtcgatatcgacgtttcctggctatcgccacaaagtgaatatcgaccaacggagtacttgcagcgttgggtctcattctggtttacggagatgaagcgtctggaagcggcgaaatgcttccagaatattcgactcgcgcaattggaaaaacactggctcggcagccggatgcagcgcgagtcgctattttcagtcaataaagaaaagttgctgggattaacagaacgtgctcgttcaggtatgtccgaggcggatagccataccgcgctgatgcttcaggaagcgcagctcaccaaagcgctgtacaaacttgccgcgcaaacctccggttatggagactttaaacgagcaaagcgtgggggcgggctggatctggcaaaccgcttcctggatcagggaaactatctggcatacgggcttgccgccgtggcggcgtgggtcaccggtatccctcacggcctggccgttatgcatggtaaaacccggcgtggagggctggtttttgaccttgccgatttaataaaagatgcgctggttatgccacaggcatttatctccgccatgcagggggatgatgacagagatttcagacaagcctgtattaatcatttccagcagtcagattccctcgatttaatgattacagcccttcaggaaaccgctgctgtagtggggggaagcgcagaatgaacgtgctgctcgtttcgcaatgcacaaaaaaggccagagaagagagttgccgtattatcgatcagtttgccgagcgtatgggaaccagtacctggcaaactgccataacgatggaagggctggcaacgctgcgcaaattattacgcaaaacagctcgccgcaatacggcggtggcctgccactggctgaaaaaaagcgggcagtccgagctgatgtggatcgtcggaaattcgcgccgttttaatgcccatggcagggtgccgactaaccgcacgacgcggtcggtatgggtttctgacgaaggtttacgttggcaatgcggcgaaagtattgctttgctggctgcaatttccgggctttttcatgatttcggtaaagcgggccgcggctttcaggaaagcctgtccgggaaaagtccaaagacttttcagccttaccggcatgaatggatttcggttcgcctgtttcaggcttttgtcggcgatcaaaatgacgatgagtggttggctatgctcggggcgctttcgcccggtgatgaagcagaactcctcaccaggttgcataaagataacccactgttttccaatagtccttttctcacgcttcccccgcttgccagggctgttgcctggcttatcctgtcgcatcatcggctgcctgataatttagatggcgataatgaaccggtgctgaaacattgtgagggctggttagaaaatcagctcaacgccagctggaattcactgaatcacaaaaatgaaagctggagggaggcggattttcataaggtctggacgttccccctgggaacgccattgcaaagtgttacctggcgagaaaaggggcggcagatagcccggcgcgccagaaatagcgcggcattaaaacagtggggccgaatggaccagccattcatgctgcatatggcgcgtttcagcctgatgctggccgaccatttctattccgccagcgaaccgcagcctgaatggcaggatccgaaatatcgtctgtgggccaacagcgatcgtaacagcggtgcactgaaacagcgagttgatgagcatctatgcggtgtggcccatcacgcgttgcttctgggtcgacagctgatgcgcgttcgttcatcgcttccggcaattgcgcgacataaaggatttcgcgagcgggcggtaaacccgctatttcactggcagaataaagcgtgggacgttgctgttgccctgcgtgaacgaagccgggaagagggtttttttggtgtaaatatggcttctaccggctgcggtaaaacctttgccaatgcgcgaatcatgtacgcacttgctgatgaacaggaaggttgtcgctttaccgttgctcttggcttgcggacgttgacattgcaaacgggggacgcgttgcgaagccgtctgaagctggatgatgacgacatggctgtattgtttggttctggtgcggtaagacaactgtggcagcagtcgaaaggaaccgatcctgacagggacagcatctcagcggagagtttatctgatgaactgcactatgttcattatgcaggtagtgtgcaggcagggattctggaaaaatggttaagcgcggatggaaaactctctgctctggttagcgcacccgtactggttgccaccattgaccatcttatccctgctacggagggcgtgcgtggtgggaagcagctgccggccatgctgcggctattaaccagcgatctggtgctggatgagccggatgactttgatatcaacgatcttcatgcagtatgccgcctggtgaactgggccgggatgctgggaagccgcgttctgctctcgtccgcgacgcttccgccggatcttatccaggcgctgtttgcggcctatctggcagggcgaaaaatatggcaggcgtcctgtggtgtcagcggcagacctgtcaatatctgctgcgcctggtttgatgagaaagatacccgcgctgagcagattgctgacggcctctctttccgtcatgcgcacaacctgtttatcgagcggcgagcaaaaatgctggcggagaaacccaggctgcattttggtcgcatcgcttctctatccgcagagcccgcaacggtggaggatatcattagccgggttgcgcaaaccgttcatacgcaaatgctggcgctgcatcaggcgcataaagagtctcacagcagcggtaaaaccgtgtcgctggggctggtgagatttgccaatatcgatccgctggtcgccgttgcgaaaacgctattcgcgataccttctccgcaagacgtctgtattcattattgcgtttaccacagtcgacatccgctgatggttcgttcagccattgaagcgtgcctggacgaagcatttatgcgtcatcagcccgccaggctctggcagcattcggatattgaaaaagcgcttcacggtcgtccggaaaagcatcatcttttcgtagtgctcggtacttccgtcatggaggtcggacgtgactgggatgccagttggggcattattgaacccagctcgatgcgctctatcattcagtttgcaggccgcatccagcgccatcgtcggcagcttcccgagagcgagaatctggcgatccttagccataatattcgggcgttacgaaaacaatccccggtcttctgcaaacccggatttgaagatcgcgccaatcctttacccgatcacaacttgcttaagctactgccgctgcaggattaccagaccatcaatgcgctaccgcggattttgccggctaagggcgacaataagctggctgcgctggagcatatgcggcttcagatggcattactcaacagcaagagcaagcagttgattgctgctgactggtggcggcgctctcttagctggagcggctggatgcagcgcaaaacgccgttccgtcagtcgcagcctgagaaatcctatttcctttatatgaatgatgaagatagcaagccctgttttgctttttataccgaagacggaagcgtcaaaccgtcaggtaattttaagccgcagtcgctggcgtttgctgacggagtcacctgctgggggaccgtggattatcagcacgcgatgttggggcaggcggaagcgctgggaattgaaatcgaccgcgtgggagccgtatttggcgaaattcgagtaccggaaaatagtcaggaggatgcaaccagcgactggagttaccacccacggttgggtgtttacagggagatacattaacaatgtcaggagcagttatgataaccgaagcactggctcactttatcactgactacatcgcttcacggaggcagccaaaattagaagcctttgaaaaagaggcggagaagcggctggcccaaggcgaggatgccggcgctatcgcgcaggagcgccaggatctcgaagtgaagtatcagccatgcaactggctgacggatgcagcaaggcgagcggggcaaatcagccttgtcactcatgcggcgaagtttactcacggtgactcaaaaagcagcagcatttaccgcgaaacggcgggcgatgagggctatttaagtacagcagtgctggctaacgtggcggcggatgcagtgggcaacgcggctgctctggacgtggcaaaacttctgcaaaccgaagtgggcggcgattcgctgctggcctgtctgaaacgcggcgatcgtagcccgctgaaggcctttgccgaaaatggcgcccagctggcgctgtggattgaaggattctctcaggcgttaacgcctgctcaacccgcctcgcataagcttgccaaacagatttactttccagtcgatggcggctatcacctgctatctccgctatttgctacctcgctggcccaggcgatgcatgaaaaaatggtggcagcgcggtttggcgaagaggcaaaagcggtacgtgaggcccaccggacgggcaaatggcatgcgcagcccgatgtgcgctatccgaatgttgccgaaatgcattttggcggcactaaaccacagaatatttcggcgttaaacagctcgcgcggtgggcgtatctggctcctgccgtcgcagccgccaaaatggacaatgctggataaggcgccgcaaaatctggctagtctctttgcgctgcgtggagagtttaaccgagcggcaaccggcactgtttcccggatggtttctctgcttaaagagaagactgataaaaataaccgccatattcgcagagtgcgggcgggatatgtcgatgaactgattgatttgctgtttcttcaggcagcgacgtaccagcaggaagcgtggcagggatggacgcttaacagcccggatttgcctctccatcagcagctttggctcgacccctggcgtagcaaaacagacgagacatttcgctctgagcgtgaaaaaggtgcctggcagcgcaatatcgccgatgacttctcacgctggctgaactatcgcctgaacaaggcgcgccttgatgtgggtatctcggaacgacgtgagtggcgcactcagcgtctgtttagtcaacggatgcgagaaatggatgccattgtgcgggaggcgctgaaatgagctatctgcttttattgccctatattcgcatcgaaaatgcgaacgcggtggccgggttaacctggggattccccgctattacccattttttagggtatgttcacgcgctttcccgccgggtgagtgactctggcatctctttcaccggctgcgcggtgattagccatgagcatcatattcaggcctattcctccggtcgcgactatcaatttgcgctgacccgcaatccgctgacgaaagaggggaaaacggctccctttaacgaagaggggcgaatgcatctcaccgtctctttgcttgttgaatgccagggcgaaatcatcaacggcgaatatggcaaagcggcgctctgttcgtctctgcttacgctctgccagagccacaaactggcaggcgggagtatcgtgagtatgggcgagccacagatatttaacgcgcctgatgatgaaagaaagctgcgtcagctcctctggcgtctgatgccgggctttgcactctgcgatcgcagcgagtggctgatggagcattatcgccagctgcagcagctgagtccggaaagcagtttactggatgcctggctggactttgcggcgatcaaatatcaggccgttcagcagggaccggaggatagcgtgagctgggagtatcagtcgaaaccgaagccgggctatctggtaccgctgatgtgcggatatcaacgtatttcccggctatacgagccgggggaagtggctaacgttcgcgatagcacaacgccgttcgcctttaccgaggccgtttatggcgttggcgaatggcgagggttacatcgtatagctgaccttcagccgcttatctggcgctaccgcacgagcgatacaggctactactgctctgcaatgtctgttgctgatgatgatttaacatttaacgaagatgacgatttagaataaggacataacgatggcaaaggctcctgtctctataaaaacggcttccgtactggcatttgaacgcaagctcgccacctctgatgcgatgatgtatgcgggaaactggctgggcgataactggcaaccgatcgaaattcaggaaaaagcggttcgtggaaccatctcgaaccgcctcaaaaacgcaatcgccagtgattcgacaaaactggatgccgagatccaaaaagcgaatctgcaacgggtggacacggcggcattacccgctgatgccgacaccttaaaagtgctatttaccctgcgcgtactagggaacttagcgacgccatcggtctgcaatgatatggcctatcagaatgcgattcagcagacgatcgagggctatatcagcgagcacggtttcgcggaactggctcgtcgctatgcggctaacctcgcaaatggacgattcctgtggcgcaaccgcatcggtgctgagcaggttcaggttagcgtgagcgcacaagagcagacgtgggtatttaatagtcacaattattcattacgtgaattttctcaggacgatgacgcaatagcctctcttgcggcgctgctcgaacaagggctgagtggtcagacgtgggtgatgctaacggttgaggcgcaggtgcgcctgggggccgggcaggaggtattcccgtcgcaagagctggtgctggatagcaacagtagtaaaagtcgcgtgctgtatcaggtcgcgggcattgccgggattcactcgcagaaaatcggcaatgcgctacgcaccatcgatacctggcaccccaaagtcgaagagctgggggcaattgcggtagaaccgtacggctcggtaaccagccgtgggatggcctgccgtcagccgaaggacaagatggatttttataccctgctggataactgggtgacgaaaggcgttaagcctgacgttgaacagcagcattatgtgatggcagtacttatccggggtggtgtatttggtgagaaaagcgaataaggggctgtcatggactatttcctggatatccgcgtgctgcccgatccggagtttggcgaagagatgcttatggccgcgttatttgcgaagctgcaccgcgctttaggggccagaagtaaaggggatattggggtaagcttccctgagttttcaatcaaaccgggaccactattacgtttacatggcgacgaatctgcactgtgcgctctggaaaaaacgctctggcgtaaaggtcttaatgattattgtcagagtgggacggtaatgcaggtaccggaaatcaaaggatggcgttgcgtcagccgggtgcaggtgaaaagcagccccgagcggctgatgcgccgttcggtgaaaaaaggctggataacgcaggatgaagcagatgcgcgattgcttaccatgcggggcgagtcgacaacactcccctggctgaatatgaaaagcctttcaaatggacagatatttccgctatttatttgtcacggcgagttgcgggcgcagcgcgtcgcgggaacattcagtagctatgggctgagccatatcgcgactgtcccttggttttagcatttcggtgagaactttcttgttgaatgttaaaacgaaccagtaccggcgctgtattttgcgccggttattcgatcgctacagaaaccctttcttatgatgaggctatcttgttgattttacaagctagttatataaggggcggaaaagggtgttgatgagagtgaggttttttttgattttaaatcaatcttttacgttgttttggtttcagttcactgccgtgcaggcagcttagaaactggacagccaatgcgacaggttatggctctacttcactgccgtacaggcagcttatggtggattaagcatatggttatagaaagataattcgaagcttgctctcacagagagctacggtcatgaatagcgtgagtttataactaaataatggtatcaggcaggaatataaaatgaaaagaccgggaattatcccggccttcagcatctggcgcgctaagcgcgaaaacgatcagcgactacggaagacaatgcggcctttgctcaggtcgtacggggtcagctcaacagtcactttgtcgcccgtcagaatgcggatgtagtttttacgcattttaccggaaatatgcgcagttaccacgtgaccgttttccagttctacgcggaacatagtgttaggcagcgtatcaagtacggtgccctgcatttcaatattgtcttctttggccatctagtcctctggggtatcactaccgtagttttgaaccggcaagataatgccgaagttcagcaagtatgtaaagttttacgtcaaatcgccgaagtagttttggcgcattacccgtaattcacgcggataaaccgggtgacaggcgcaaacgtaaagggggagtgacagaacaatgggtgttatctgactcttattattcccaaacggcggcggggcaacgggcagaagctactctaccgcgcaattataacatcccaacaaaaaatgtgctgaaaacatttatgcttctcctgcaaatagcacccttggtacccagaatcgctccggcagacgatacgtccgcagcacggaaagatagtcgaggtaatcgcggcggggaatttccactgcgcccagcgacgccgtatgcttattcagcacctgacaatcgattaattttccgccatcctgcgaaaatatctggctaaagaccagcagcgcggttttagaggcgttttcggcacggctgaacatcgactctccgcaaaacagcgcgccctgcgcgacgccgtacatcccgccgactaattcctttccctgccatacttcaacagaatgagcatgtcccagctcatgcagctggtggtatgcctgaacgatccccggcgttatccatgttccctcatcgcgatggtcggcgcagccctcgataacctgaccaaaggcatgattcagcgtgacgcgataaggcgagcgctgatggaaacgcttcatactgcggctgagatgaaatttctctggccacagcactgctcgcggatcgggggaccaccacaaaatagggtcgccgggcgaaaaccacggaaaaataccgcgctgataggccatcagtaaacgcgccgggctaagatcgccgcccagcgctagcaggccattaggttcgcgtaaagcgccttccggggaggggaaggcgatggaatgatgagagagctgaaccagccgcatttttacctcaacgcatcaggcaatgattcaatagtagcctacaggcgctgcttaaactggtagtaacgcccctgttcagccagcagttctgcgtgactaccttgctcaataatcttcccgttgtccatgactattatctgattaaaacgcgccagtccgcgcagacgatgggttaccattaacacggttttttcacgcatcacttccgccagtaaatcaaggatttgactttcggtcgtcgcatcgaggccttcagtgggctcatcaagcagcatgagaggcgcatcgtgaagcagggcgcgggcgatagccagcctgcgcagctcgccgccggaaagctgacgaccgccttcacccagccagctgttcagaccgctatcttccagtaatttcgctaagccgacgcgttcaagcgtttgggcaagccgggcatcgctggctccgggagaagccagcagcaggttgtcgcgcagcgtagcgctgaacagatgcacgcgctgcggcacgacgctcatcgcccggcgcagcgtcgcctcattaaactgccccagcggctgattgttgagtaatatttccccttcagccggatcccaggcacgggtcagcagctgcaacagggtcgatttaccgcagcctgttcgtccgaggatggcgatatgctctccggcctcgatctgcaatgacactttctccagcgcgggggagggctgctgcggatagctgaaggtgacctgatgtaagcgtaacgagacgcgatccagcgtctggccttcgccctgagggaaggccacttccggctcttgctcggtaatttgcgtgatgcgctttgcggaggcgatcacctgccctaaatgctgaaatgcgccggttaccggcgccagcgcttcaaacgccgccagcgcgcagaagacaaacagcgcaatcagcgcccctggctgagtatcgccgccaacgcccgcggaggcgagccacagcatagcgataaccgcaattccgccaatcagcagcatcagcgcctgagagagcgcggtgagctcagcctggcgacgctgcgcatccagccagcgcgcttccgttttttccatttgctgccggtagcggtcgctggcgttgaacagcatgagttccgcctgtccctggagccatgaggtcagatgctggcgatattgcccgcgaagccgggttatgctttcacctgcgggtttacctgcgcgatagaacagcggcggcatcaccagcagggtgagcagcataataccaccgagggtcagggccagagtgacgtccagcacgctcaaccctacggtgacgaccaggatcaccaccagcgcgcctaccagcggtgatatgacgcgcaaatagagatgatccagggtatcgacatctgcaaccacccggttaagcagctcaccctgacgaaaacgcgccagtccggcgggggagagcggcagcagcttactgaaggtaaagacccgcaggtgttgcagaacgcggaaggtggcgtcatggctgaccagacgctcaaagtagcggcccgcggtgcgaataattgccgcgccgcgcacgcccgcggctggcagcatatagttaaagctgtagatgcccgccacgccaacgacggctgatgccgacaggaaccagccggatagcgttaataagccaatgctggccagcagcgtcacgatcgccagcacgataccgagcagcaacagccatttgtgtcgtttgtacagcgccaggtaaggccataatgcgcgcatttaaatctcctcctgacgatgagcgagcagggtcgcgaaggggccgccagcggccgccagctgcgaatagctgccttgctcaacaattcgaccatcctgcataacccagatcgcatcccagttcgccagtccttccagctgatgggtaaccattaacgtggtttgctgcgttgatgcattggtcagcgcctgcatcacgcgctgttcgctatgcgcgtcaaggctggcggcaggctcatcaagcagcagcagacgacagggcaccagcagcgctcgtgcgacggcgacgcgctgagcctgcccgaccgacagccggccggcctgatcgccaacaggcgtattaataccctgcggcagaagagagacgaactcgctaacccaggctttatccagcgcaagctgcagctgcgcttcggtggcttcagggcaggagagcaggacgttttcgcgcagcgtcgccgcgggcagctgtggattttgcccgacccagctcaggagacgacgccagcggtcggcatccagactctttaactcgacgccattgaccttgagcgagccgtcatagggaagaaaacccgttaacgtattcagtagcgagcttttgcccgagccgctttgcccaaccagcaccacgcgttcaccggcgcgcagggaaaaattcagcggcccggccagcactttcccttcgggagacttaatcagcaggtcgcgagcttcaaggcttaccgtttcatcatcttttaatgccttttccccacgctctgcctgcgctagcggcgcttccataaaggtcttcaggctatcggcggcgccaatcgcctgcgctttcgcatgataaaaggtacctaaatcgcgcagtggctggaaaaactcaggagccagaatcagggcgaggaaaccggacatcaacgtcaccccggcgccgtaatggccaaagttgagctctcccagataggaaaaaccaaagtaaacggcgaccagcgcaatcgacagcgaggtgaaaaactccaggacaccggaggagagaaacgccaggcgcagcacttccattgttcgctggcggaaatcctgcgaggcctcgcgtatgttgtccgtctccgcttcgccgcgatgaaaaatacgcagcgtttccataccgcgcaggcgatcgagaaaatggccgcttaaacgcgccagagcgagaaagttgcggcggttggcatcagccgcgcccattcccaccagcgccataaacagcggaataagcggtgcggtacccagcagaatcagcgccgcggcccagttgatggggaaaatcgtaataacaatcagcaacggtacagaggcggccagcgtcatctgcggcaaatagcgagcatagtagtcatgcatatcgtcgatctgctcaaggatcagcgtggcccagctacccgcaggtttgccctgtatccacgccggtcccgcctgctgtaaacgatccagaacctgacggcggatctcaaggcggatatgttgaccggcctgaaaacccactctttcacgcagccagaccacccaggcgcgcagcacaaagaccagcaccagtagcgtaaagggcagcagcagcgccgttgcggggatattttccataatcatgcgatggaggatcctcgccaggaaccaggcctgggcgacgatcaacaggccgctaacgacgcccaatacgcgggaaatcatcaaccagcgacgggagataatgctttgatcttttaaccaacgggttaactcttgttgacgggttttattcattgcgcgcttagcaggtgtagttatgagttttttgggcacggcaatgttacaacgaggcaaaaataaaggcgacttttcgtcgccttctttacctttgttactgacttgtaaagattatttgcaagcgtcggctaaaccatccagatagcgctccgcgtccagcgccgccatgcagccggtacccgcagaagtaatcgcctgacggtagatatgatccatcacgtcgccggcggcgaagacgcccgggatgctggtctgggtagcgttgccgtggatgccggactggactttaatgtagccgttttccagctccagctgaccggcgaaaattgccgtgttcgggctgtggccgatagccacgaacagcccagcaacctcgagggattcaacgttgtccgcattctgggtatcgcgcagacgcaagccgcttacgcccatctggtcgccggtcacttcttccagcgtacggtgggtgtgcagcacgatattgccgctctccactttgtccatcaggcgtttaataaggattttttccgcgcggaagccgtcacgacggtggatcaaatgcacttcggaagcaatgttagacaggtagagcgcttcttcgacggccgtattgccgccgccgatgacggcaaccttttggttacgatagaagaaaccgtcgcaggtcgcgcaggcagacacgccgcggcccttaaacgcttcttccgagggaagacccagatagcgtgctgaagcgccggtggcaataatcagggcatcgcaggtgtattcgccgctgtcgccgaccagacggaacggacggttttgcaggtcaacgctgttgatatgatcgaaaataatttcggtttcaaatttggtggcatgttcatgcatgcgctccatcagcagcggtccggtcagatcgttaggatcgcctggccagttttccacttccgtggtggtggtcagctgaccgcctttttccattccggtaatcagtaccggctgcagatttgcgcgcgctgcgtagaccgcagcggtgtatcccgcaggtccagaaccaaggataagcagtttactgtgtttggccgtgcccatgagatcctcataatttattggcatacatgggctggattgtagggaatttgtggacgtaaaaaaagagcgcggcggttttgttaacgatatgtgcaatagaagctgccgattaatcggcgatttaacgaacgaagaatataactaattctactgttagcgagacaattataagaggaaaacatgagaatcaaccggggaggattatgaatatctggcatcttgtactaaaaatcgatgttttgctttgacaatcccctgtgcttttgcgaaaacattcatggaagaagaaaagcagtgtttcgcgtgtggcgaattttcatgcacgcaaatgccatttttatccgggttagcgaaatctacgcatggtgtggacagacgccatgcgtgatgtcggtgactgccgtcaggcaacgggcttctcacgtacccctgggttacccaacgtcgtacgggtgataacaggatggactctggcagtgaaggctcagagtcggaacaggagtagggaaggaatacagagagacaataataatggtagatagcaagaagcgccctggcaaagatctcgaccgcattgatcgtaatatattgaatgaattgcaaaaagacgggcgtatttccaacgtcgagctttctaaacgggtgggactttctccgacgccttgccttgagcgcgtgcgtcgactggaaagacagggttttattcagggctatacagcgctgctcaacccgcactatctggatgcatcacttctggtatttgttgagattactctgaatcgtggcgcgccggatgtgtttgagcaatttaactccgctgtgcaaaaacttgaagaaattcaagagtgtcatctggtttccggggattttgactacctgttgaaaacccgcgtaccggatatgtcagcgtatcgtaaattactgggcgagaccttgctgcgcctgccgggcgtaaatgacacccgtacctatgtggtaatggaagaagtcaagcagagtaatcgtctggtaatcaagacgcgctaacacggaacaggtgcaaaatcgatgtagtttgattacactcctgttaatccatacagcaacagtgccggggagacccggcactgttgtccgttttagccgaaggcaggaaacagcctgatacctggagagcctttcttgagccaggaatacactgaagacaaagaagtcaaattcacaaagctgagtagcggacgccggctccttgaggcgttactcattctttgctccctttttgccatctggttgatggcggccttactcagctttaatccctcggatcctagctggtcgcaaacggcgtggcatgagcctattcacaacataggtgggacgccgggagcctggcttgccgatacgctatttttatttttggcgtaatggcctataccattccggtcatcattatcggcggctgctggtttgcctggcgtcatcaggaaaacgacgagtacatcgactatttcgccgtctcgctgcgtttaattggcgcgctggcgctgatcctcacttcctgcggtctggcggcaatcaacgctgatgatatctggtatttcgcctccggcggcgtgatcggcagcctgctgagcaccaccctgcaaccgctgctgcacagcagcggcggcacaatcgcgctgctctgcatctgggcggcaggactgacgctatttaccggctggtcctgggttagcattgctgaaaaactcggcggtgcgattctttctattctcacgtttgccagcaaccgtactcgtcgtgacgatacctgggttgatgaaggggaatatgaagatgatgaagaagaatatgaagatgatgaacccgcgaagccgcagggttctcgacgggcgcgaattttacgcagcgccttagctcgccgccagcgtctggctgagaagttctctaatccgatgggacgtaagaccgatgcggcgctgttctcgggtaaacggatggatgacgccgaagacgaggttcagtacagcgccggcggtgcgcctgttgccgctgacgatgtccttttttctggctccagcgcagcgcgtccggcaaatgctgatgatgttctgttctccggcgtcagtgcggcacgtcccggcgattttgacccctacgatcctctgttaaacggtcatagcattgccgatccggtagctttggccgcgcaggataccgctgcgccgcaggcatggtctgaaccgctgccagggtatgaggctcagccggtctatcatccggaacaggcaccggtacagcagccagcatatcagccagaaccggcttaccagccgcagcatgcgtaccagccagagcaggcgccggtacagcagtcagcgtatcagccggaaccgacttaccagccgcagcatgcttaccagccggaacaggcgccggtacagcagccagcatatcagccggaaccggcttaccagccgcagcatgcgtatcagccggagcaggccccggtacagcagccagcgtatcagccggaaccggcttacccgccgcagcatgcgtaccagccggaacaggcgccggtacagcagccagcgtatcagccggaaccggcttaccagccgcagcatgcgtaccagccggaaccggcttaccagccgcagcacgcgtaccagccggaacaggccccggtacagcagcctgagccttacgccgcctccgttgagcctgagcctccgcaagaggaggtgaagcctcagcgtccgccgatgtactacttcgaagaagtggaagagaaacgcgcgcgtgaacgcgagcagcttgccgcatggtatcagccgattccggagccggtcagtccggttgcgacaaagccgatctcgcctccgcctgctccggcggctgatgttgccgcggtgagcgcgctggcggctggcgtccatcaggccaccggggcggcctctgctagcgccgcggcggcctccgtcgcatctgccgcatccagcgccgcgccgctatttagcccggcgtcgggcggcccgcgtgcgcaggtaaaagagggtataggcccgaaattgccgcgtccaaaccgcgttcgcgtgcccacgcgccgtgagctggcttcctatggcattaagctgccttcgcagcggttggctgaagaacgtgcgcgtcaggcagagcatcagcactatgatgacgatgcgctgacggacgaggaagttgcagagcttgagcagggtgagctggcgcgtcagttcgcggctgcgcaaaatcagcgctatggcgagagctacgctgcggaagaggctgatgtagacgaggattctgccgctgaagccgaacttgcccgtcagtttgccgcttcccagcagcagcgctacgccagcgagcagccgccgggatcgcatccgttctctgcggcggattatgaattctcgccaatgaaaacgttagttgatgacacaccgagcgagcctgtcttcacgccgttgccggaagtacagcagcctgccccgcagtatcagcagccggcccagcattcgcagcccgtacagcagccgatgccgcaccagcagatgcctcagccgccgcaacatgcgcagcagcaggcttatcaacccgcgcagcagcagccggttcaccatcagccgatgccgcagcaggctcctggcagctatccgcagcagcaggctccgcagcagccgatcccgcagccgcaggaaagtctcattcacccgctgctgatgcgcaatggcgacagtcgcccgttacagaagccgacgacgctgctgccctcgcttgacctgctcacgccgccaccggctgaagttgagccgatcgatacctttgcgcttgagcaaatggcgcgtctggttgaagctcgtctggccgatttccgcattaaagccgatgtggtgaactactcacctggcccggtcattacccgctttgagcttaatctggctccgggcgtgaaagcggcgcgcatttccaacctgtcgcgcgatctggcccgttctctgtccactgcggcggttcgcgtggtggaagtgattccgggtaaaccctacgttggcctggagctgcctaacaaaaagcgccagaccgtttacctgcgcgaagtgctggataatgcgaaattccgcgataatccttcaccgctcacggtggtcctcgggaaagacattgcgggcgaacctgtcaccgccgatctggcgaagatgccgcacctgctggtggcgggtaccaccggttccggtaaatccgttggggtcaacgccatgatcctcagcatgctctataaagcgcagccggaagacgtgaaattcatcatgattgacccgaaaatgctcgagctgtcggtctatgagggaataccgcatctgttaacggaagtcgtgacggatatgaaagacgcggccaatgctttgcgctggagcgttaacgagatggagcgtcggtataaactgatgtctgcgctgggcgtacgtaatctcgcgggttataacgagaagattgctgaagctgcacgtatgggacggcccattccggatccttactggaagcctggcgacagtatggatgcgacgcatccggtactgaaaaaagagccttacatcgtggtgctggtggatgagtttgccgacctgatgatgaccgtcggcaagaaagtggaagagctgattgcgcgcctggcgcagaaagcgcgcgccgcggggatccacctggtgctggcgacccagcgaccgtcggttgacgttatcaccggcctgattaaagccaacatcccgacgcgtatcgcctttaccgtatcgagtaaaattgactcgcgtactatccttgaccagggcggtgcggaatctctgctgggaatgggcgatatgctctactccgcgcctaactcgacgatccctgtgcgcgtccacggcgcttttgtacgcgacgaggaagttcacgccgtcgttcaggactggaaggcgcgcgggcgtccgcagtatgtcgatggcattacctccgatagcgaaagcgaaggcggcggcggtggctacgagggcggtgaagagctcgatccgctgttcgatcaggccgtcaactttgtcacggaaaaacgcaaagcctccatatccggggtacagcgtcagttccgcattggctataaccgcgccgcgcgtatcattgagcaaatggaagctcaggggatcgtgagcgagcaggggcataacggtaaccgtgaagtgctggcgccgccgccttttgagtaaccgcaaagttgggtaaataagtgaaaatcagcctgttctgctgttttacggtcattggccgttctacattagcagcagaccaggctcccgcgtcgggagtgacgcacattaaggaataacaatgaaaaaactcgcaatcacctgtgcattactgtccagttttgtcgtcagtcaggtatgggcggatgccgccagcgatttaaaaagccgccttgataaagtgagcagcttccactccagctttacccagaaggtcaccgacggcagcggtaatgccgtgcaggacgggcagggggacctgtgggtcaagcggcctaatctgttcaactggcatatgacccagccggatgaaagcgtgctggtgtccgacggcaaaacgctgtggttttacaacccgtttgttgagcaggctaccgctacctggctgaaagatgcgaccagcaacacgccgtttatgctgattgcccgcaatcaggccagcgactggcagaactacaacattaagcagaacggtgacgattttgttctgacgccgaaaaacggcagcggtaatctgaagcagttcaccatcaacgtgggtcgcgacggtacgattcatcagttcagcgccgtggaacaggacgatcaacgcagcagctatcagctgaaatcgcaacaaaatggtgccgtggatgcatctaagttcaccttcacgccgccgcaaggggttacggtggacgatcaacgtaaatagaggcgaacgtgagcaacctgtcgctcgatttttccgataacgcgtttcaacctctggccgcacgtatgcggccagaaaatttagcgcagtacattggccagcagcacctgctggcgccgggtaaacccttaccgagggcgattgaggccgggcatctacactcgatgatcctctgggggccgcccgggacaggaaaaaccaccctggccgaagtgattgcgcgctatgccagcgccgacgttgaacgtatctcagcggtgacctccggggtgaaagagatccgcgaggccattgaacgcgcgcgccaaaaccgcaacgcgggtcgccgcacgatcctgtttgtcgacgaagtgcaccgtttcaataaaagccagcaggacgcctttctgccgcatattgaagacgggaccatcacctttatcggcgcgacgacggaaaatccctcctttgaactcaattccgcgctgttatcccgcgcgcgcgtttatctgctcaagtcgctgaccagcgacgacatcgagcaggtgctcaaccaggcgatgagcgacaaaacgcgcggctacggcgggcaaaatatcgtcctgccggacgagacgcgcaaggccatcgccgaccttgtcaacggcgatgcgcgccgggcgctgaatacgctggaaatgatggccgatatggccgaagccgacgcctccggcaatcgcgtgctgaaagttgagctgctgactgaaattgccggtgagcgcagcgcgcgtttcgacaacaaaggcgatcgcttttacgatttaatctccgcgctgcacaaatcggttcgcggcagcgccccggacgccgccctctactggtacgcgcggattattaccgccggcggcgatccgctctacgttgcccgccgctgcctggcgattgcctcggaagatgtcggcaacgccgatccgcgcgcgatgcaggttgcgatctccgcatgggactgctttacccgtgtcggaccggcggaaggcgaacgggcgattgcacaggccattgtttatcttgcctgtgcgcccaaaagcaacgcggtttacaccgcgtttaaagcggcaatggccgacgcccgcgaacgtcccgattacgacgtcccggttcatttgcgcaatgccccaacgaagctgatgaaagagatgggctacgggcaagagtatcgctatgctcacgatgaaccgaatgcttatgccgccggggagcagtacttcccgcaggaaatggcgcaaacgcgctattataagccgacaaaccgggggctggagggcaaaataggcgaaaagctcgcctggttaaccgaacaggatcaaaatagcccgataaaacgctaccgataattgaggcgttgcggtaaggttgtcacactatttccgtggtcgcgctctgcggccatttttcttttattaattcgataagcacaggataagcatgctcgatcccaatctgctgcgtaccgagccagacgcagtcgcagaaaaactggcacgccggggctttaagctggatgtagataaacttcgcgctctggaagagcgtcgtaaagttctgcaggttcaaactgaaaacctgcaggcggagcgcaactcccgatcgaaatccattggccaggcgaaagcgcgcggggaagatattgagccattacgcctggaagtgaacaaactcggcgagcagcttgatgccgctaagaccgagctggacgcgctgctggcggagatccgcgatatcgcgctggctatccctaatatcccgcacgacgacgttccggccggtcgcgacgaaaacgacaacgttgaagtcagccgctggggaaccccgcgtgagttcgattttgacgttcgcgatcacgtcacgctgggcgaaatgcatggagggctggattttgccgccgccgtgaagctgaccggttctcgctttgtggtcatgaagggccagctggcacgcctgcatcgcgcgctggcgcagtttatgctggatctgcataccgaacagcacggctacagcgaaaactacgtcccgtatctggttaaccaggacacgctgtacggtaccggtcagctgccgaaattcgccggcgacctgttccatactcgtccgctggaagaagaagccgacagcagcaactacgcgctgatcccgacggcggaagttccgctgaccaacctggttcgcgatgaaatcattgatgaagacgatctgccgatcaaaatgaccgcgcatacgccgtgcttccgctctgaagccggatcttacggccgcgatacccgcggtctgatccgtatgcaccagttcgacaaagtcgagatggtgcagattgtacgtccggaagattccatggcggcgctggaagagatgaccggccacgccgagaaagtgctgcagctgctgggtctgccgtatcgtaaagtggctctgtgcacgggcgatatgggcttcagcgcatgcaaaacctacgatctggaagtgtgggtgccggcgcagaatacctatcgtgagatctcttcctgctccaacgtctgggatttccaggcgcgtcgcatgcaggcacgctgccgcagcaaatctgacaagaaaactcgcctcgtacacacgctgaacggttctggcctggcggtcggacgtacgctggtcgcggtgatggaaaactatcagcaggcggatggtcgcatcgagatcccggaagttctgcgcccgtatatgcgcggccttgaatttatcggctgatttttcaacgctcttctcaaaagcgcctgcgggcgctttttttttacccccttcttgataccgggcaataatcgccttcgcgattacgaagatactccctttggattaaacaggataaaaaactaataaaggttaatttcgttgtatatataactatataacggcattaagttaattgtgagcaaccaaagcgagtatctatgaaaaccaaaacctccgatgctttactggctgctgaggtgagccggcgtggtttaatgaaaaccacggcgattggcgggctggcgatggccagcagcgcttttaccttacccttcacgcgcattgcccaagccgcagataacctcaatcccgccagcgaaacggtcacctggagcgcctgtacggtgaactgcggcagccgctgcccgctgcggatgcatgtggtgggtggtgagataaaatatgttgaaacggacaataccggcgacgatagctacgacggtctgcatcaggttcgcgcctgtctgcgcggccgctcgatgcgtcgacgcgtctacaacccggaccgcctgaaatatccgatgaagcgcgtgggtaaacgcggcgagggcaaattcgagcaaatcagctgggaagaagcgtttgatactatcgccagcaatatgcagcgcctgataaaagagtacggtaatgagtccatctatctgaactacggaacgggaaccctcggcggaaccttgactcgctcatggccaccggggaaaaccctgattgcccgcctgatgaactgctgcggcggctatctcaaccattatggcgactactccaccgcgcaaattgccgcgggactgaactacacctacggcggctgggccgatggcaatagcccgtcggatatcgaaaacagcaagctggtggtgctgtttggcaataaccccggggaaacccgcatgagcggcggcggagtgacctactacctggaacaggcgcgggagaaatccaacgccaggctgattattatcgatccacgctataccgacaccggcgccggacgcgaagacgagtggatccctatccgcccgggaaccgatgctgcgcttgtctccgcgttggcgtgggtgatgattaacgagaacctcgttgaccagcctttcctcgacaagtactgcgtaggctatgacgagaaaacgctgccggaaggggcgccggccaatggccactataaggcctatattctcggtcagggcaaagacggtatcgcgaagacccctgagtgggcgtcgacgattaccggcattccccaggcgcgtatcgtgcagctggcgcgcgaaatcgccagcgctaaacctgcctatatttctcagggctggggcccacagcgtcatgccaacggtgagctggtttcccgcgcgatttccatgctggcaatcttaaccggcaacgtcgggattaacggcggcaataccggcgcacgtgaaggttcttactccctgccttttgaacgtatgccgacgctggataatccggtggaaaccagtatttccatgtttatgtggaccgatgcgattgatcgcgggacggaaatgaccgcgctgcgcgacggcgtgcgcggcaaagataagctcgacgtgcctattaaaatggtctggaactatgccggtaactgcctggtcaaccagcattcagagattaaccgtacccatgacatccttcaggatgacaagaagtgcgagatgattgtggtcattgattgccatatgacctcctcggcgaaatatgccgatattctgctgccggactgtacggcttcggagcagatggattttgccctcgatgcctcctgcggcaacatgtcatacgtgatttttgccgatcgggccatcaagccgcgctttgaatgcaaaaccatctatgagatgaccacggagctggcgaagcgcatgggcgttgagcaacgtttcaccgaaggccgcactcaggaagagtggctgcgtcacctctatgagcaatcccgtaaagcgatcccggcgctgctgccgtttgatgaattccgcaagcagggaatcttcaaacagcgcgatccggaaggccaccacgttgcctataaagctttccgcgaagatcccgtcgccaatccgctcacgacgccgtcagggaaaattgaaatctactctgcgcagctggcggaaattgccgcgacctgggagctgaaagaagaggatgttatcgatccgctgccgatatacagccctgggtttgaaaactatgacgatccgctggcgaaaaagtatccgctgcagctgaccggttttcactataaagcccgcacgcactccacctacggcaacgttgacgtactgaaagccgcctgccgtcaggagatgtggatcaacccgcttgatgcacagaagcgcggtatcgccaatggcgatcggatccgcatttttaacgatcgcggtgaagtgcatatcgaggccaaagtgaccccgcgcatgataccgggcgtggtcgcgctgggtgagggggcctggtataacccggacgcaggccgcgtggatcaggctggctgcattaacgtgctgaccacccaacgcccgtcgccgctggcgaaaggcaatccatcgcatagcaacctcgtccaggttgaaaagctgtaaggagtaaccgatgacaactcaatatggattttttattgattccgcccgttgcaccggttgcaaaacctgcgaactggcttgtaaagactataaaaacctcacgccggaagtgagcttccgtcgtatctacgaatacgccggcggcgactggcaggaggataacggcgtctggcagcaaaacgtctttgcctattacctctctattgcctgcaaccattgtgaggatccggcctgcaccaaagtttgcccgagcggggcgatgcataaacgtgaagatggctttgtcgttgtcgatgaagatgtctgtatcggctgtcgctattgccatatggcctgcccatacggcgcgccgcagtacaatgcgacaaaaggtcatatgaccaaatgcgacggctgccacgagcgcgtcgccgacggcaaaaagccgatttgcgtggaatcttgcccgctgcgcgcgttagatttcggcccgattgaagagctgcgccaaaaacacggccagctggccgccgttgcgccgctgccttcggcccacttcactaaaccgagtatcgtgattaaacctaacgccaacagccgaccgtgtggagataccaccggctacctggccaacccaaaggaggtgtgagatggggagtggatggcatgaatggccgctgattattttcacggtctttggtcagtgcgtggtgggcggcttcattgtgctggctctggcgctaatgaaaggcgacttatcgcgtgaacagcagcagcgcgtcgtgtggagcatgtttggcctgtgggtgctgatgggcgtgggctttattgcctcaaccctgcatcttgggtcgcctatgcgcgcgtttaactcgctcaatcgcgtaggcgcctcgtcgctcagtaacgaaatcgccagcggggcgcttttcttcgccgtcggcggcattggctggctgctggcggtggtcaataagctaccggcggggctgcgtcatctctggctggtcattaccatggtgctggggattatcttcgtctggatgatggtccgcgtctataacactattgatacggtacccacctggtatacggtctggacgccgcttagcttcttcctgacgatgtttatcggcggtccgctgctgggatatctgctgctgcgcgttgccgatgtcaacggctgggcgatgcgcctgctgccggcggtgaccctgctggcgctggtgattagcgccatcgtggtgctgatgcaaggcagcgagctggcgacaatccatagctctattcagcaggcctcggcgctggtgccggcctacggctcgctgatggcgtggcgcctggttgcgctggcgttggcgctgatctgctggattgctccccagctcaaaggctaccagcctgcgctgccgatgctggggctggcttttgtgctggtgctgatcggcgagacgatcggccgcggcgtcttctacggcctgcatatgaccgttggaatggcaatcgccagctaatcgccctttatcgcgccagaaacccttattctggcgcgataaaaagtgcggtcgattcatgaaatatttctaccgatattcccaccgctattttccaataaattaataaaaacaatggaataatataaataactattctgttgtcgatccgctggataaaaaacttctatcgttcccccgcaaaccgcgtcacgcctgatttcaggcggattgacaatgtttgcagcagtggcatgatgcgcacgaaatctgaactccatcacggtttatatccatgaccatctacacccggccagtgcaaatgctgctctgtggcctgcttttgttgaccctggcgatagctgttttaaatacgctcgtcccgctttggctcgcccatgaaaatatgccgacctggcaggtcgggatggtgggctcgtcctattttaccggtaatctggtgggaacattgcttgccggatgggtaattaagcgtctgggctttaaccgcagctattacctggcatcggttatttttgccgtgggctgcgtgggtcttggtattacgctgggcttctggagctggttcagctggcgctttatcgccggcgtcggctgcgcgatgatttgggtggtggtggagagcgcgctggtctgtagcggcacttcgcggagccggggtcgcctgctggcggcgtatatgatgatttattacgtcggcacggtgctgggccagttaatggtcagcaagctgccgacggatctgatgagcgttctgccgtgggtgacggcgctggcgctggcggccattctgccgctgctgtttgctcgcgtggcgactcaggccgatgagccgcacgaaccggcgcgtatctggccaatgttaaggctgcgtcaggcccgccatggcgtcaacggctgcattatttccggcattgtgctcggttcgctgtatggcctgatgccgctgtggctcaaccaccagggcgttagcgattccggcatcggcttctggatggcggtgatggtgagcgcaggtatcgtggggcagtggccgattggccggctcgccgatcgctacggccgtctgctggtcctgcgcgttcaggtatttgtggtgattctcggctgtctggcgatgttaagccaggccgcaatggcgcccgcgctgttcgtgctgggcgcttccggcttcacgctctatccggtggctatggcctgggcctgcgaaaaagttgagcgtcatcagctggtggcgatgaaccaggcgctgttaatgagctataccgtgggcagcctgcttgggccgacgctgaccgccatgctgatgcagaacttctctgacaatctgttgtttatcatgattgccagcgtgtcattcatctacctgctgacgctgctgcgcaaagcggggcaccatcctacgccggtggcgcacgcctgatttttcagaacatagccagggcatgtccctggctatggattaatgcgacgcaagaagcgcaataaactgtgcccggttttgcaccatgctgtatcgctgaagtctctccccctcatccagccagcagactaaccgctggatggtctggatatgctgttcactatcggccgccgccagtacgactatcagccgaatgccgggatgctccggaaaatcaacggcctcgctacagcaaagcagcgaaagcgcgctgtttctgctcagcacgccggcttccggacgcgcgtgcggtagcgcaaacgccgggctcaatatataccaggggccatcctgctccgtggcgctgataatagccctggcatagcccccggtgatttttccctgctcctcaagcgggcggcaggcgagatgaacggcgctgcgccagctcaggcagtcgctggtgaactgacaggcggaaaatagcctctcttccataaacgttccctttacgcgcgagccgaccgccaactgatcggctcgcctggtggttagcgtagcgcgttaaacagcgcgtctcccgagatgccatatttcgcttttagctgcctgctattacccgattcggtaaatgtgtcctgcgttcccagacgcgtaaggcgcgccggatgtgccttttgcgccagggtttccgcgatcaggccgccgaggccgccgttgacggtgtgattttcaagcgtagcgataagcgggcagccttcgaccagccgataaaatgcctgctggttgaagggtttgacggttgcaacgtgaataagcttgccctttttgccgctggcgagcagcttttcatagccgtcggtagcctgttccagtaccgttccttcaaacagaatcgcaaaatccgcgccgctgtcggcgatggcggcgatatcgctgacccgcggaacgacgcttttgtcgcgaaccggcatcggctcgcgcgccacgcgaatataaacgggtccctttatttttgccgcctgctcgaaggcctcggcgatttcttccgcatctgccggggtcaggacggttaaccccggaaggacgcgggtcagcgctaaatcctccagcgcatggtgtgaagcgccgtccgggccatcatccataccggggtggctaccgacgagtttgatgttggctttggcatagcacgcctgccgcagctgggtccaggcggtgccggtgacgaacatcgcaaagttaacatagaagggcataaagccttccagcgcctggccggccgcgaagctcatggcggaaccttccgcaatgcccatttcgaaaaaggcctccggatagacggcctgaaactggtcggtacgggtagagctggctaaatcgctgtcgataacaacaacgggatagcccttttcttttagcgcaatcagggcatgcccgatctcatcacggggtgctttcatcactgtaactcctccatcgcctgctgaaattgttctttgctcggggtttttgagtgccagtcgccgttgttttccatatagctgacgccggaacctttggtggtgcgcgccacgatggcgacaggtttacctttcaggtgacgggatagcatcagggtatcggcaacctgatgcatatcattgccgttgtgcagttccagtacatgccagccaaagctgcggattttgtccgccagcggctcgagattaacgacgtcattgaccggatcgtgggaagagaagccgttgtaatcgatgatggcgaccagattatccattttcatatgcccggcctgctgtaaggtttcccagatttggccttcatgcatttcgccatcgccaacgatggcaaatacccggtgcggatcgttgcgccgctttttggcggccgccataccaaaagcaatcgacagcccctgacccagcagtccggttgtcgcatcgacttccggcagcgacttaatgctcgggtgcccctgcaggcgcgagttgatctgtcggaacgtattgaactcgctgcgctcgatcttgccttgttgatacagcatggcgtactgcgcggcgacggcgtggcctttactcatcaccacgcgcgagcggggggaggcggccagatcgacttcctggtaatagagccaggtaagcacgtcgattattgacagcgccccgcccggatggccaattccggactcgtaaatcatggtgacgatctcgcggcgggcggcaagcgcgtgggatttcagttcatcaatgttcatgttcattccttcttagggcagcattttaccgatgtagtacacgaccagacccagagcgacgaagtcggtttccgggaagctggtgcctgaaagaccgacggattccataatcgggtaaatcagcgccgggccgatgccgatcaggatcccggtgataaagcttccggcaatcgcgcctttccagccgccggaggcattaccaaataccgctgcggtcgcgccaatgaagaagtagggaatggctaccgggataatcacggtttggccaaggatcgccagaaagcccatcaccaccagcccgccgacaaacgaagagataaaccccagcaccgtggcggtcggggcgtaggggaagaccaccgggcagtcgagcgcgggtttggcgttaggaataaacttctccgagatgccgaggaaggccggaacaatttctgacagcagcaggcgtacgccggtaatgatgatgtacagcgaagcggtaaaggtcagagactgaaagagcgggtaaaccagccagtgcatcccgcctgccgctgcggtgaccgcggcttttccggcagcgagcgcggcgatgtagtagaagatgctcaccgagatcgacaccgagacgatgtaatctttaaagatccccagccagccgggaagattcagcttttcggtggattgtttcggatcgccgacctttgcgccaatccagccggaggcggcgtaggccagggtgacgtagtgccccatcgcgatctcatcattaccggtaatttttcgcatccacggttgcgcaatggccggatagaggcaggcggcgagacccagcagcacggagccgacaatgatggtcgtcatgtcgctgtagcccagcgctttcagcgttacggtaagcagcgcggagagataaagattatgttgcccggtaagaaagatatatttaaacggcgtcacgcgggcaaaaaacaggttccagccaaaaccaatcaccatgatcagcgacacgcacatggcgaatttggtttgcgccagtccggttagcgcttctgccagcggcatgacgcccttcaggccaaagccatcgctgaataaggtctgaaagttacccagggaagtgactgccagaccggcgccgccggcaaaaaccagaaagccgacgatggttttgaaggtgccggaaaggactttttcaatcggcttgcgttggattaacaggccgattaatgcaataaagccaactaaaagtggggttacgcccagaatgtcgaatacaataaatctgaggaaatccatattgcctccgggagaggttagttgctttgaacgatgtcggtgagcgcagactccatctcttcactgttcatcaggtcggtgatgccgaccgctctgaatccggcggcttcgacttcgtcggtgagatcgcgcatagtgatgacaaaatcaatatctcgccaggtgcgtaaccctgagaggacgtcgtgctccagctcgatattccagccgtgcttgtcgatgattttttgtgctttgattttgagcattaaggagctgcccataccggtacgacagactatgagacctttcattcgatgttctcctgtttgtaaaaataattatttttatttatttgtatgagataataattattatctttgcggcaggacgaaagatgtgactgtgtttgcattttgagcaaataaggcaaaacatgagccagatagacaataacttgttgataagcataagaaacggagcttcagggctaagcccgatactggagaaagttggccgttttattacggaaaatcctgactttgtgatgcgtcacacgatttcagaactggccgactccattgataccagtgaggggagtatcacccgtttttgtcgggcctttggttttaaaggtttctcggatttcagaaccgcgctggcgatggagcagggcgccgcgcgctcggaagaccacggtatcaacgagagcgaagagattgcgccggtgctggcgagcattcgcgacagtaatgccattgtcgataaccaggagctgaaagccgcggccgactggcttaacaccctgaacagcattgctatttatgccgtgggcacggcggtgccggtggcgttgttcctgcagatgaatttaatcaatatgggtaaggcggccagctttatcgatcgctcctatccggcggcgatgccgctgctggctgacagtcaaaaaaccggcatcatcgtcgttcacagcgaacaggcatcggcggatatgatgcaggccctgtcgctggcaaagcagcagggcgttaaaattttatcgctgacccgcgggacgtttgcgccgctggcccgtttatctgactggaatcttcaggcggcggtagctttacagggggaaggggagtcggggtttgcggaaatcgccggcgcaatgatggtggccgaccggatcctcagcgcgctggaagagcaggatgaacgctatgcggaataccgaaaagcgcatcagaagcgcattttctcgattgagagcgtggcgaataagctgtcggaatattttatgtcctgacgctgattttgttggggaaacacccggtagcgcaatctctaccgggtggggattttagtacatcaccttatgaccgtactgttccagaatgcccttcacgcgttccatggtctctttctttggcggatggacgccgtccagcttgtactcttcgcccatggctacccatttgtgcttgcccagctcgtggtacggcagcagttcgattttctcaacgttgcccatgtcacgagtaaactcacccaggcgatgcgcggaatcatcatcgtcggaccagcccggaaccacaacgtagcggatccagacgttgatgtttttgtttgacaggtaacgggcaaactccagcgtccgatggttagagacgcctaccagattctggtgaatttcatcattcatttgcttgagatcgagcatcaccagatcggtgacttccagcagttcatcaataaccgggtcgtagcggcgcacaaagccgttggtatcgagacaggtatgaataccttctttcttacaggcgcggaaccagtcgcgaacaaattcggcctgcaggatagcctcgccgccggatgccgtcacgccgccgccggaagcgttcataaagtggcgataggtcaccacctctttcatcagctcttcaacggtaatctctttgccgccgtgggtatcccaggtatcgcggttgtggcaatagaggcagcgcatcaggcagccctggaagaaggtgataaagcggatccccgggccatcgacggtgccacaggattcaaaggagtgaatgcgaccaattgttgacattgcggtgatatctccgaatttggcccatccggggcctatgtagatgcacagctcaaaggctatgtcgagtctgttttggctgttatccataaagtatagacagcagacaaaagaggctggggcaggatgatattgctaaaaaggccccacttgcgtggagcctttattgtacgctttttactgtacgatttcagtcaataccattacatggtctgagtgaaggtacgagtaataacgtcctgctgctgctctttcgtcagggagttaaaacgtactgcgtagccggatacgcggatggtcagctgcggatatttttccgggttttccatcgcgtcgagcagcatttcgcggttcataacgttgacgttcagatgctgaccgccttcgatggacgcttcgtggtggaagtaaccatccatcaggccggcgaggttagttttacgaacttcgtcgtctttacccagcgcgttcggcacgatagagaaggtgtaagaaataccatctttcgcgtaagcaaacggcagtttcgcaacggaggtcagagaggcaacagcacctttctggtcacggccgtgcatcgggttagcacctggtccgaacggagcgccagcgcgacgaccgtcaggggtgttaccggttttcttaccatacacaacgttagaggtgatggtcagaacggactgagtcgggatagcgttgcggtaggtgtgcagtttctgaattttcttcatgaaacgttcaaccaggtcaacggccatatcatcgacgcgagagtcgttgttaccaaactgcgggtattcgccttcgatttcgaagtcgacagccagaccgttttcgtcacgaatcggtttaactttcgcatatttgattgcagacagggagtcagccgcaacggacagacctgcgataccacatgccatggtgcggataacatcacggtcgtgcagcgccatcagggaagcttcgtagctgtacttgtcgtgcatgtagtggatgatgttcagcgcagtgacgtactgtttagccagccagtccatgaagtgatccatgcggtccatcacttcgtcgaagttcagaacgtcgcctttgatcggttcagatttaggaccaacctgcattttcagtttttcatcaacgccgccgttgattgcgtacagcatggttttcgccaggttagcacgcgcgccgaagaactgcatttgcttaccaacaaccatcgggcttacgcagcaagcgatagcgtagtcatcgttgttgaagtcaggacgcatcaggtcatcgttctcgtactgcagagaagaggtatcgatggacactttcgcggcgtattttttgaagctcagcggcagtttttcagaccacagaatggtgatgttcggctccggagacggccccatggtgtacagggtgttcagaaaacggaagctgtttttggtgaccagagtacggccgtcaacgcccataccgccgatagattcggttgcccaaatcgggtcgccagagaacagttcatcatattcaggggtacgcaggaaacgaaccatacgcagtttcatgaccaggtggtcaatcatttcctgtgcgtcttgctcggtgattttaccggctttcaggtcacgttcgatgaagatatccaggaagctggaggtacgaccgaaggacattgccgcgccgttctgagatttaacggcagccaggtagccgaagtaggtccactggatagcttcctgagcggtggttgccggaccagagatatcgcagccgtattttgccgccatttctttgatctgacccagcgcacggtgctgttcagagatttcttcgcgcagacgaatagttccttccagatcttcgccgttttccagtttctcttgcagagagacgaactgagcgtatttgtctttcatcaggaagtcgataccgtacagcgcaacgcgacggtagtcaccgatgatacgaccacggccataggcatccggcagaccggtcagaacgccagatttacggcagttcaggatgtctttggtgtaaacgtcaaacacgccctggttgtgagttttgcggtattcagtgaagattttcttcagcatcgggtccagttcgcgattgtacgctttgcaggaaccttctaccattttgatgccgccgaacgggataatcgcgcgtttcagcggagcttcagtctgcagaccaacgattttctcgagacctttctcgatgtagccagcgtcatgagaagtgatggtggatgcaagggaagtatcaaaatcaacaggcgcgtgagtgcggttttcctgtttaacgccttccattacggtgtcccacagcttggtggtcgcgtcagttgcgccagccaggaaggactcgtcaccttcgtacggggtatagtttttctggatgaagtcgcggacgttgacttcgttctgccagtcacctttcgcaaaaccttcccaggctgtggctaacttttcattaagctcggacatgtaacacctaccttcttaagtggattttttatttactgcctgaaacaacccttagtgatggtcgtcgccacgcaggtaaatgacccagtatgtcaacccaaccagcagaccaccgccgatgatgttcccgatagttaccggaatcaggttatcagtgatgaagttcatgacggtcaggtgagagaaactttccggagttgaaccgacagcggtccagaattccgggcttgcaaagtcgcggataacgatacccagcgggatcataaacatgttcgcgatactatgctcaaacccgctggcaacaaacattgccaccggtaaaaccataatcatggctttatccatcaggctgcggccggagtagctcatccataccgcaaggcagaccatcaggtttgccaggatacccaggcacacggcttcaacaaaagtatggtgcattttgtggtcggcggtttgcagaacgttaagtccccattgaccgttggcagtcatatattcgcctgaaagccacatcagcaatacaaagagtaagcaaccaatcaggttaccaacatagacgttgagccagtttttcgccagttgaccccatgtgattcttccgctggctttcgcgacaacgataagaacggttgaggtaaacaggtcggcaccgcaaataacgcagagaatcaaacctagtgagaagcagatgcctccaatcagtttggcaaccccgaatggcatcccggctgtgccggttgtcgcggtaatatagaaaacaaaagcgatagagatgaagacacctgcggtgatcgccagataaaacgtctttatcggatgttttgtcgctttatagacacccgcttcttcggcgactttcgccatggcagcagggagtaaaagatcaaaagggttgtcagctttcacactaactctctctttatgtaagttggcggtgagatactaacaaagcattatagaagggaatttgatgtagatcatatcctaccggaactataggccttttgagtgtgtggatttgccttaatgttgacttaatttgttgttttttaatgaaaaaataaattttaaaatttacaaataatgttgattattttcattttacccccgtttttcggttaattaaaatggggtatttttattaaaattaacaatatttgcggtgggattttattatttctcaccactaattaactttatggctacaatcgggctttggggttgcggaaaacataaaaatgggggccttcgccggcccccataatagggttattcaggcagtaaagcgcgcttatttaccccagaatgctgcttttgcgcgctgcagcttttcgtaggctttcagcagcgactgatgagccgggaacgcgagcaggtcgctgtctactgcctgcaggccgtagaaaggcgcttctccgctcagcgcggcgctggcggcttctacggcatcggcgccgtacatgcgtacaaaagcgttcagatactgcagcggctggcgctcctcttcctggctcagcagcagcagggtttgcaggcagcggtagtaattagcgcgctcggcgctaaagatggaggcgttgaactccatggtccactcggtccagattagcgcctgctcgagatcgccgcccgccagcgcgagcatagctttcagctcgccaatgcgcagcgtataccagccgttgtctttgccggtcgccagacccagcagttcgcgcacgcgggtgaagtcatcaaggccttcatcatccatttgttcgataagcgccagataatcttctttttcccactcgctttccggcagggaaagaatcgtttcccgcagaggcgcgcccatgctgttattcgccagccagaggtcttccgccggataaatatcagacatgcccgggacaatgattcggcaggcgtagacgctcaggtgttcgtaatcggcgatgtaaacttctttatcttcttgtttaaagatagccatcagggtggcgaactcttcctccgtggttccggagaagctccagtccacgaacgggtagtcggcatcctgcttaaacatatcccaggagatcaggccgctggaatcgataaagtgcgtttcaaggttcgcatgttcagcgacttcttcatcatcgaaggttggcggcgtgaagacgtcgagatctttcaggctgcgaccctggagcagttcggtaacggtacgttccagcgccacgccgaaatcgggatgcgcgccgaaagaggcgaaacaggtgccgttagccgggttaaacagcacgacgcagataaccggatatttgccgccgagcgaaccgtcataagcgaaaatcgggaaaccttcggcctccagcttattgatcgattcgactacgcccggatagcgtgccattacctccgccgggatctccggcaggctgatgctttcggcgataatgcggtttttaatatgccgttcgaacacttctgagaggccctgaacgcgggcttcgttgcgggtgttgcccgcggacatcccgttagaaacgtacaggttgccgacaatattcatcggaatatagaccgtttcaccatcagactggcgggtgaacggcagaccgcagacgccgcgatcgtcattccctgactgcagatcgaccagcatgctggcggttaactgatcgtcaggatcgtagaacgcgcgcaggcgggtatccagcaggccttccggtacttcgtcatcgtcggttaacgggaaccatttttcattcggatagtgaacgaagggaccgttggcgatagtctcgcccagccagaagtcggcaaagaaatagttggtcgagagacgctcaaagtactctccgagcgcggaggccagcgcggcttttttggtggcgcctttgccgttggtgaagcacagggcgcactctttatcgcggatatgcactgaccagacgtgcggaaccgggttgagccatgaggcctcttcaatatcgaatccgaggtcgtgcaacttctgctggaagcgagcgatggaatcttccagggcggcatctttgccgggaataaatgtttgagtcatggcagtcacttttatcgtacgtaaagcgcgcaatgatacgggttttagatgacgggtgctatctccatcgtctggctatgcttatgtcactcaataactgttcaggcgttaatcatgaagacatttgactggcatcgtatggcactggataaagtgcccgtggaatttctggccgaggtggcattacggagcctctacaccttcgtactggtatttatttttctcaagataaccgggcggcggggcgttcgtcagatgtcactgttcgaagtgctcatcattttgaccctcggttcggccgcgggcgacgtcgcattctatgatgacgttccgatgctgccggtactggcggtttttatcactctggccctgctgtaccgattgattatgtggctgatggggcatagcgaaaaactggaggatctgctggagggtaagccgattattgttgtggaaaacggcgagctggcctgggagaaactgcaggcggaaaacatgaccgaatttgagttttttatggagctgcgaatcagcggggttgagcaactggggcaggtgcggctggctattctggaaaccaacgggcagatcagcctctatttctatgaggatgacgatgttaaagccggactctccattcttccttcccgctttaccgatcgttttaccacgataccccgggacgacgagtatgcctgcgttcgctgtagcgcaatccttacgctacgagccggggataaacaattatgccctcgctgcgcaaatgcagaatggtcgaaggtcagccgggcaaaaagagtcacctgacagcaattatgtcggttttatgacgtcaagctggcagattcttttgtgtgagcgaggccgcatttccccgacgctcagttttagccattgcggtgcgtgtcactgaatgataaaaccgatagccacaggaataacttatgcccgcgacggttcgcgggtaaataacatagcaagtggtgaggggaaatggctcaggtctataacttcagttcaggcccggcaatgctgccggcggaagtactcaaactggcacaaaaggaactgtgcgactggaacggtttggggacgtcggtgatggaaatcagccaccgtggtaaagagttcattaaggtggctgaagaagcggaacaggattttcgctccctgctcaatattccttccaactataaagttttattctgccacggcggcggtcgcggacagtttgccggtatcccgctgaacctgcttggcgataaaaccgttgccgactacgtcgatgccggctactgggcggccagcgcggtaaaagaagcgcataaatactgcacgccgaacgtgatcgacgccaaaatcaccgttgacggcctgcgcgcggttaagccgatgagcgaatggcagctgacccctggcgcggcctatctgcactactgcccgaacgaaaccattgacggtattgccattgaagaagcgccaaactttggcgacgatgtggtcgtcacggcggatttgtcatcgacgattttatcccgtgaaattgacgtcagccgctatggcgtgatctacgcgggcgcgcagaaaaacatcggtcccgcaggtctgacgctgattattgtgcgcgaagatctgctgggtaaagccagcgtagcctgcccgtcgattcttgattactccatcctgtccgccaatgactccatgtttaacacgccgccgacgtttgcctggtacctgtcaggtctggtgtttaaatggctgaaagagcagggcggcgttgccgctatggataaaatcaaccagcagaaagccgacctgctttatagcaccatcgataacagcggtttctatcgcaacgatgtcgctgcggcgaaccgctcgcgcatgaacgtgccgttccagctggcggacagcgcgcttgataaactgttcctcgaagagtcctttgccgcaggtttgcatgcgctgaagggccaccgcgtcgtgggcggcatgcgtgcttccatttataacgccatgccgctggcgggcgtgaaggcgctgaccgactttatgcaggacttcgaacgccgtcacggttaatcgccgccgcgttttttcatccccgcagccggtctgcggggtttttattctgtttgtttgagagttgagtttaatggaatccctgacgttacaacccatcgcacgcgtagatggcacgattaacctgcccgggtccaagagtgtctctaaccgtgccttgctgctggcggctttggcccgcggcacgacggtgctgaccaacctgctggatagcgacgatgtacgccacatgctgaatgccctgagcgcgctgggagttcattacaccctgtcttccgatcgtacccgctgtgaagtcaccggcaacggcggccctctgcaggcggctgaagcattagaactgttcctcggtaatgccggaacggcgatgcgtccgctggcggcggcgttatgtttaggccgtaacgatattgtgctgaccggcgagccgcgaatgaaagagcggccgattggccacctggttgacgcgctgcgtcagggcggggcgcagattgattacctggagcaggaaaactacccgccgctgcgcctgcgcggcggtttcagcggcggccaggttgaagtggacggcagcgtttccagccagtttctgaccgcgctcctgatgaccgccccgctggcgcctcaggataccgtcatcgcgattaaaggcgatctggtttccaaaccttatattgatattacgctacacctgatgaaaacctttggcgttgaggttgaaaatcagtcttaccagcgttttatcgtacgcggcaatcaacactaccgctcgccgggcgactacctggttgaaggcgatgcctcctcggcatcctacttcctcgccgccggcgcgattaagggcggaacggtgaaagtcaccggtatcggccgcaacagcgtccagggcgatatccgttttgccgatgtgctggaaaaaatgggcgcaaccatcacctggggcgatgacttcattgcctgcacccatggtgaactgaacgccatcgatatggatatgaatcatattccggatgcggcgatgaccatcgccacggcggccctgttcgctaagggcaccacgacgctgcgcaacatctataactggcgtgtcaaagagaccgatcgtctgtttgcgatggccacggagctgcgtaaagtgggggcagaggtggaagagggggaggattacatccgcattactccgcccgcgaagctccagtttgctgagatcggcacctataacgaccaccgtatggcaatgtgcttctcgctggtggcgctttccgatacgccggtcaccatccttgatccgaagtgtacggcgaaaacgttcccggactacttcgagcagctggcgcgaatcagtacgctggcctgaataacgcgcgtttaaggtaaaaacgccggccatcgtgtcggcgtttttttatgcccgcgagttaaatcggcaagccctggcgcagtacgttcgcgctggcatcgccgcagattaacggtaaaacggcatcatcttccgggctgttgctctgtcagcccgctataattgcacaattcttccacaggagatttcctgttatccgtaatttacaagcaatgctcactttccgtcgaagagatgcgtataatgcgcggcgtttatatattgatgcgccttgctgaaggagaaaaagatgacggcaacagttccggtaatcaccattgatgggcctggcggtgcgggcaaaggcaccttatgcaaggcaatggcagaaacgctgggctggcatctgctcgactctggggcgatttatcgcgtgcttgctcttgctgcgctacatcatcatgtggatgttgaatccgaagaggcgctggtgccgctggctgcgcacctggatgttcgttttgtctccactaacggtagcctggaagtggtgctggagggggaggacgttagcgctgagattcgcactcaggatgttgccaacacggcctctaaagtggcggcttttccccgcgtgcgtgaagcgttgctgcgccgccagcgggcctttcgcgaattgccaggcctgatcgccgacggacgcgatatgggcaccgtcgtattccctgatgcgcaggtgaaaattttccttgacgcctccgcggaggaacgtgctcatcgccgcatgcttcagttgcaggagaagggctttagtgttaactttgatcgccttttatccgagataaaagagcgcgacgatcgcgatcgcaatcgtacagtcgcgccgctgatcccggctgccgatgctttagttcttgattcaacagaactaaacattgagcaagtgattgaaaaagcgctacactatgcgcgcgaaaaactggcttccgcttaatcgtcttatcgataaagcacaacagcctccgaattatagcagtacccccgcagcaatggagtgttagcgggtatgttaaacaaccccatccggcatggagccaggtggacgttaaatatgaaacctgaagattaaacatgactgaatcttttgctcaactatttgaagaatccttaaaaacaatcgaaacccgtccgggttccatcgttcgtggtgttgttgttgctatcgacaaagacgtagtactggttgacgccggtctgaaatctgagtctgccattccggcagagcagttcaaaaacgcccagggcgagctggaaatccaggttggtgacgaagttgacgttgctctggatgcagtagaagacggcttcggtgaaaccctgctgtcccgtgagaaagctaaacgtcacgaagcttggatcacgctggaaaaagcttacgaagacgctgaaactgtagtcggtattatcaacggcaaagttaaaggtggcttcactgttgagctgaatggtattcgtgcgttcctgccgggctccctggtagacgttcgtccggtgcgcgatacgctgcacctggaaggcaaagagcttgaattcaaagtcatcaagctggaccagaaacgtaacaacgttgttgtttctcgtcgtgccgttatcgaatccgaaaacagcgcagagcgcgatcagctgctggaaaacctgcaggaaggcatggaagttaaaggtatcgttaagaacctcactgactacggtgcattcgttgatctgggcggcgttgacggcctgctgcacattaccgatatggcatggaaacgcgttaagcatccgagcgaaatcgtaaacgttggcgacgaaatcactgttaaagtgctgaagttcgaccgcgaacgtactcgtgtatctcttggcctgaaacagctgggcgaagatccgtgggtagctatcgctaagcgttatccggaaggtaccaaactgaccggtcgcgtgaccaacctgaccgactacggctgcttcgttgaaatcgaagaaggcgttgaaggcctggttcacgtttccgaaatggactggaccaacaaaaacatccacccgtccaaagttgttaacgttggcgatgtagtggaagttatggttctggatatcgacgaagaacgtcgccgtatctccctgggcctgaagcagtgcaaaaacaacccatggcagcagttcgcggaaacccacaacaagggcgaccgtgttgaaggtaaaatcaagtctatcactgacttcggtatcttcatcggcctggacggcggcatcgatggcctggttcacctgtctgacatctcctggaacgttgcaggcgaagaagcagttcgtgaatacaaaaaaggcgacgaaatcgcagcagttgttctgcaggttgacgcagagcgcgagcgtatctctctgggcgttaaacagctcgcagaagatccgttcaacaactgggttgcactgaacaagaaaggcgcaatcgtaaacggtaaagtcactgcagttgacgctaaaggcgcaaccgtagagctggctgacggcgttgaaggttacctgcgcgcttctgaagcttcccgtgaccgcgttgaagatgcaactctggttctgagcgttggcgacgacgttgaagctaaattcaccggcgttgatcgtaaaaaccgcgcaatcagcctgtctgttcgtgcgaaagacgaagctgacgagaaagatgcaatcgcaactgttaacaaacaggaagatgcaaacttctccaacaacgcaatggctgaagctttcaaagcagctaaaggcgagtaatcttagtctttcgggttacaacaacctgaattacgacgagtttacttgacagattgcaggattcgtcctgtaatcaagcacaaagggcggctacggccgcccttgtttaagctgttagctaattttgccttgaaggaaaccggaggaataatgaccaagtcagaattgatagaaagacttgccagccagcaatctcacattcctgcgaaagcagtggaagatgctgttaaagaaatgctggagcatatggcctcaacgcttgctcaaggcgagcgcattgaaatccgcggtttcggcagcttctctctgcattatcgagcaccccgcaccgggcgtaacccaaagactggcgataaagttgaactggaaggtaaatacgttccccactttaagccgggcaaagaattacgcgaccgcgccaatatttacgaagagtaagtttcgccgatcggcgacaacatacttaaacgttaaaaaagcaccttcgggtgctttttttatgcctttaaatctctctttgaagtgacctcgcaaaacgcgggttctgttgcgttaacgcagtagattttgcggatggcgcggcgcagttcctttccttgcctggcgacactctccccgtttagcgtaacactccctctgacagggaggtgctaatgcgtttaccacaacttgccggctgtgtgattctcggtattctgccgctgctctggctgccagtactgcccgggcggtgggttatctgggggctcatggccctggcgctactcattgcgcaatgtcgacgcagacctgcgcaatatgcggcattgataacgctgttttttgtctggggagccctcagcgcaggcgaggtactgtggccgacggagaggttaacggacaggaatcgccaggttgacgttgagctaaccgcaacggacgggcagacaacgcatcaggggaagattatccgtctggatgggcgacggctgtttcctgcgccagggattagcctctacggcagctacctgccagaaacgccctgcgcaggtcaggtttgggcaatgacgctgcgcgcgcgtccggtacacggacagctcaacgatggcgggtttgatagccagcgtcatgcattgtcgcagcatcgtccgttaaccggacgctttatcaccgctgacgttcgggtgcggacctgtagtttgcgagcgcgttatcttgcttcgctgaatcaaacgctgaacgcgttgccgtggcaatcggtgatgctagggttaggcatgggggagcgtctggcgataccgcgcgagataaagaccctgatgcaggaaaccgggacatcgcacctgatggcgatttctggcttacatatcgcgctaggggcttcattgggctggttgctgctcagaggtgtgcagttttttctcccgtgccgctggcttggctggcgggcgccgctgctcgttggcctggcgagcgcgattttttacgccgggctgaccggtatgcagccacccgcgttgcgcacctgcgtcgcgctggccgccggctgcacgctgcggctatccggaaaacgctggtcgccatggcagctatgggtctgctgcattggcgcaatactgtttgccgatccgctggcggtgttgtccgaaagcctctggctttccgcgtttgccgttgcggcgcttatcttctggtatcagctggcgccgatgccgggcggcaaaaggagcgggctactgcgtcaaagcctcgcgttatgtcatctgcagatcggtttaatgtttttacttgctcctctacagatcgcactttttcacggcatcagcctgacgtccgtgctggccaacttgattgccgtgccgctggtgacctttgtcgttgtcccgctaattctgaccgcgatgtttttacacctctgcgcgccgtttatcattgagatggcggtctggcaatcggcggaccgtgttctggccgcgctattctggttcttacgacagctaccgcccggctggctggcgctggatgcgcgctggcttgggataagcttgctgccgtggctggcgttaatcgtctggcgttttcatgcgtggcgcacgttgcccgcgttttgtttagcatttctcgggctattgagctggcccttctggcggagcacggctgctaacgaatggcgagtcaccatgctggatgtcgggcaggggctggcaatggtgattgaacgcgagggcgcggcgcttctctatgataccggcctggcctggcccgagggagacagcggtcagcagatcattattccctggctacgctggcatcatttgcagcttgaaggcgtcgttctcagccacgagcatctcgatcaccgcggcgggctaaattcggtgttaaaggcgtggccccggatatgggtgcgaagccctttaggctgggcgggtcatttagcctgccagcgcggagaaacctggcagtggcggggtttaacctttcgcgcgctatggccgctgcctggagcgacagcgcaggggaataatcgctcgtgcgtggtgcgtattgatgacggtaaacacagtattctgctgaccggggatatcgaaacgcctgcggaacgggcgatgattagccgctactggcagcatcttacgtctacacttatccaggtcccccaccacggcagtaatacctcgtcgggaatcgccctgctgcgtagcgttggcggagaagctgcgctggcttccgcttcgcgctataacgcgtggcgcatgccatcaaccaaagtgattcagcgctaccgaaaacagagttatcagtggttcgacacgccgcatcaggggcaaattacggtggttttttctccggatagctggcaaatccatggcttacgggatcaagttttaccgcgatggtatcatcagtggtttggcgggaaggcgtagaacgggtagaatatgcggctatttcaacacaagctggtttattgaatgcagaacgataaagatctctccacgtggcagaccttccgccgactctggccgattatagcgccgtttaaacccgggctaatcgtggcagcggtagcgttagtgcttaacgcggctagtgataccttcatgctatcgcttcttaaaccgttattggatgatggttttggtaaaacggatcgctcggtgctgatatggatgccgctggtggtgatcgggttgatggttctgcgcggcattaccagctacgtttcgagctactgtatctcctgggtttccggcaaggtcgtgatgacgatgcgccgtcgtttattcagccacatgatggggatgccggttgccttctttgacaaacagtccaccgggacgctgctatcgcgtattacctatgattccgagcaggtcgcgtcttcttcctccagcgcgctgattaccgtcgtgcgcgaaggcgcgtcgattattggcctcttcgcgatgatgttttattacagctggcagctgtcattgattctgatcgtgctggcgccgatcgtgtctattgcgattcgcgtggtctcgaagcgttttcgtaatatcagcaagaatatgcagaacaccatgggccaggtgacgaccagcgcagagcagatgctgaaagggcataaagaagtgctgatgtttggcggtcaggccgtcgaaaccaaacgttttgataaagtcagcaataaaatgcgcctgcaggggatgaaaatggtctccgcgtcgtcaatttctgacccgattattcagctgatcgcctctctggccctggctttcgtgctctatgctgccagcttcccgagcgtaatggagacgctgacggcgggtaccatcaccgttgtcttctcttcaatgatcgcgctgatgcgtccgctgaaatcactgactaacgtcaacgcgcagttccagcgcgggatggccgcttgccagacgcttttcgctatccttgactccgagcaggagaaagatgaaggcacgcgggttatcgaacgcgcgaagggcaacctcgaatttaaaaacgtcaccttcagatacccgggacgcgaagtcgccgcgctgcgcaatatagacctgaatattccggaaggaaaaaccgtggcgctggtagggcgctcgggttcgggtaaatcgaccatcgccagcctgattacgcgtttctacgatgttgatgatgggcagatcttactggacggccacgacctgcgtgaatacaccctgagctccctgcgcgatcaggttgcgctggtgtcgcaaaacgttcatctctttaacgataccgtagcgaataacatcgcctacgcgcgtactgaagagtacagccgcgagcagatagaagaagctgctcgtatggcttatgccatggactttatcaacaaaatggacaatggcctggatacgattatcggggaaaacggcgttatgctttccggcggtcagcgccagcgtatcgctatcgctcgcgccctgctgcgtaacagcccgatactgatcctcgacgaagccacgtcggcgctggataccgaatcggaacgcgctattcaggcggcgctggacgaactgcagaaaaaccgcacctcgctggtgattgcccaccgtctgtcgacgattgagcaggccgacgagatcgtggtggtggaagatggccagatcgttgaacgcggcagccataccgacctgcttgagcacaggggcgtttacgcccagctgcataagatgcagttcggcgcatgattgcacgcatctggtccggtgagtcgccattatggcggctgctgcttccgctctcctggctctatggcctggtgagcgggttgatacggctgagctataaactcggttggcaaaaagcctggcgagcgccggtgccggtggtagtggtgggtaatctgaccgcgggcggtaatggtaaaacgccggttgtcgtctggctggtggaacagctccagcagcgcggtattcgcgttggcgtcgtttcacgcggctacggcggtaaagcagcgagctatccgctgctgctcaatacggctacccccacagcggaagcgggcgatgagccggtgctgatttaccagcgtaccggcgcgccggttgccgtctcgccggtacgcagcgatgcggtacaggccctgctcgccgcccacgatcttcagcttatcgtcacagacgatggcctgcagcactataagctggcgcgcgacaaagaaattgtggtgattgacggcgtgcgccgttttggcaacggctggtggctgcctgccggccccatgcgcgagcgcgcttcgcgtttacgcagcgtggatgcggttatcgttaacggcggtctcgcccgtccgggagagatcccgatgcagcttcgccccgggcaggcggtaaatctgctgaccggtgaacgccgggatgcggcggcgttggacaacgtggtggcgatggccggaatcggccacccgccgcgcttcttcgccacccttgaaagctgcggcgtcagtccggtaaaaaccgtcgccttagccgatcatcaggcattggcgcagagcgcagtcgccgcgctggcgacgccgcagcaaaccctgctgatgaccgaaaaagatgcggtgaagtgccgcgaatttgctcaggcaaactggtggtatcttccggtcgacgcgataatgactgaccaacgcgcgcagcggttgctcacggacttagttaccctggcgcaacgctaatcgtcgtatcaccgcttgcgccggaacccttaacggagaagctgcatgccggtattgtccctctcgcttaaagaagcccgccatcttcaccttgccgctcaggggctgctaaaaaagccccgtcgccgcgcaaagcccggggatattctgcagaccattaagcagatgtccctgctgcaaatcgataccatcaatgttgttgcgcgcagtccttatctggtgctgttcagccgcctcggccactatccgcagcgctggctggacgaggcgctccgcgccggcgagctgatggagtactgggcgcacgaagcctgctttttaccgcgcagcgacttttcactggtacgtcaccgcatgctgacgccggataaaatgggctggaaatatcacaaagcgtggatgaccgaacacgccgagggcattcaggcgctgttggcgcatatagccgaaaatggcccggttcgctcggccgacttcgagcatccgcgcaaaggcgccagcggatggtgggagtggaaaccgcataagcgccatcttgaaggcttattcacagccggtgaagtgatggttatcgagcggcgtaattttcagcgcgtttacgatctgacgcagcgggtcatgccggactgggacgatgagcgcgatgggctctctcaggagcaggctgaagccatgatgttacgtaatagtgctcgcagcctggggatttttcgcgcgcagtggctggcggattattatcgtctgcgtcagcccccgctgccgctactgctggcgagctggcaggaggaggggctggtggtgccggttaacgttgaagcgctgggcgaaatgtggctccaccgtgatgcactggcgctgctggaatcttcacccggcggtaggctcgccgccagccgcagcgcggtgctttcgcctttcgatccggtagtctgggatcgcaaacgagcggaacagctgtttaactttacctatcgcctggagtgctacacgcccgcgccgaaacggcagtatggctatttcgtattaccgctgctgcaccaggggagactggttggcagaatggatagcaaaatgcaccgcaaaaccggcgttctggaaattatcgccctgtggctggaggagggcgtcaaggtgacgtcgggtctggagagcgggctaaaacgcgccattgatgattttgccctctggcaggacgccacgcgggtgagctgcgggaagctgccggcggaactttttgccgggcggcaacagggttgggaaattgacgctgcctgagcccacgtgtgatatgctgctgaagaatctattcggtccatctggaggaatcatggatcaccgtttacttgaaattatcgcctgtccggtttgtaacggtaagctgtattacagccaggataagcaagaactgatctgcaaacttgatcgcctggcttttccgctgcgtgaaggcattcccgtactactggaaaccgaagcccgcccgcttcctgtagaagagagccagtcatgagtttcgtggttattatccccgcgcgcttcgcttctacccgcctgccagggaaaccgctccaggatatcaacggcaagccgatgattgtccatgttctggaacgcgctcgcgaatccggggccgagcggattatcgttgctaccgaccatccggacgtggcccgcgcggtggaagccgccggcggtgaagtctgcatgacccgtgaagatcatcagtcaggcaccgaacgcctggccgaggtggttgaaaaatgcgccttcagcgatgacaccatcattgtgaatattcagggcgatgagccgatgatcccgcccgcgatcgtgcgccaggtagccgagaatctggctgccagcaccagtggtatggcaaccttagcggtgccaatccacgatgcggaagaggcgtttaatccgaatgcggtgaaggtcgtcatggatgctgagggctacgcgctctatttttcccgcgccaccattccgtgggatcgcgatcgtttcgctaaatcccgcgagtctatcggtgattcgctgctgcgtcatatcggtatttatggctatcgcgccggttttattcgtcgctatgtgagctgggcgccgagcccgctggagcaaatagagatgctcgagcagctgcgcgtgctgtggtatggcgagaaaatccatgtcgcggtggcggaagtggttcccggtacaggtgtcgatacgccggaagatctggagcgcgttcgcgcggagctgcgttaatcccccccatcccctccgccaggaggggatatccccaggccgttattccatacttttttacgtcaattttgatctcacccgatgacaaccccggcccaggcgctcattatgaaaccggtagtattcataggggtaatcagaaatggaacagttgcgtaccgagctgagccacctgctgggtgaaaaactaagccgcgtggagtgcgtcagcgagaaaccgtcgtcggcgctgtggtcgctatatgatgcgcagggaaacccaatgccgctgctggcgcgcagctttacgacgccgggcgtggcgcgtcagctggcgtggaagatatcaaccctggcgcgaagcggcaccgtccgtatgccggttgtctacggcgtgatgacgcacgacgagcatccgggtcccgatgtactgctgattgaacgactgcgcggcgtctcggttgaagcccccgcccgcacgccggagcgctgggagcagctgcaggagcagatcgtggaagcgctgctggcctggcatcgtcaggatagcggcggctgcgtcgggatggtcgatagcactcaggaaaatctctggccgtactggtaccgccagcgcgtggaggtgctatggagtacgctgaatctttatcaggataccggcctgacgatgcaggacaaacgcatcctgttccgcacgcgcgaatgccttatggatttgtttaaaggtttcaatgataactgcgtgctggtacacggtagcttcacgctgcgcagcatgcttaaggatccgcgcagcgatcagctgctggcgatggtggggccgggcatgatgctctgggcgccgcgggaatacgagcttttccgtctggccgagagcggtcaggaagaggagctgctgtggcactatctgcgccgggcgccggtggcggaagcgtttctctggcggcgctggctgtatctgctgtgggacgaagtggataatctggtgaataccggacgctttgaccgcgtccggtttgacctggcggcaaagtcaatcctgccctggctcgcctgaagaaccttttagccactgccagatgcggcctaacgtttcgtaacccacccgatcgctatgcatgagccagacgggcgaaggaatagcccgctcccacgggttaagcggtgactcaatcgccagctggttggccggcgcgggcaggggagttagcccggcgcggcgaaagaaaatcatcgcccgcggcagatgagaggcggaggtgaccagcaggaacggcgcatcgcctatcgccatcttcaccgcagcggcttcctcttcggtatctttgggtttatccaggacaaggatttcgctgcgcggtatgcccaggctctctgccactctggccccggcttctgccgtactgaccggatttgtttttgccgctgcgccggtaaagatgagtttcgagcccggattttcataccacaggcggatcccctccgtcagccgcggcaggctattattgatgagattggaactgggcgcccagtccgggttccaggtgtagcctccgccaagcacgaccacgtactgcacgcgcttttcacctcgccacgtcgggtacttatcttcaattggcttgagcaggctatcggcgaccggttgcaggctcaacagcagcaacagcagccagccgaggctgacgcagagcttgccggtgcgctggaaacggctaaaccacagcagggctatgccgagcgcaatgagcagcagcagcaggggaagcggcagcatcataccgcctaaaacctttttcagcgtaaaaagcatgccgtacggttccttttttaaccatataaccaaagatatgcccggatcttacaacagatcgcttcattctccgcgcgggtatgacaaaatagcggctttgtgttggcgtgtggagtcacccgtgcaggatcgtaatttcgatgatattgctgaaaagttttcgcgcaatatatacggcaccaccaaaggccagctgcggcaggcgatcctctggcaggatctgcaaccgctgctggaccggctggggcctgggccattgcgagttcttgacgcgggcggcggcgaagggcagacggcgatcaaagtggcggaaatggggcatcacgtcacgttatgcgatctctctggtgaaatggtggctcgtgcccggcaggcggctgccgataaaggtgtgatcgacaacatgcattttgtacaatgcgcggctcaggatattgagcagcatttggaaagtccggtcgatctgatactgtttcatgcggtgctggagtggatagccgaaccacaggcgatgttgcgtaccctgtggtcgatgctgcgccccggcggcgcgttgtcgctgatgttctacaatgctaacggtctgttgatgcacaatatggtcgccggaaatctcgactatgtgcaaatcggcatgccgaaaaagaaaaaacgcacgctgtcgccggactatccgcgcgatccgcagcaggtttacggctggctggaagagattggctggcagattaccggcaagaccggcgtgcgggtgtttcatgattatctgcgtgaaaaacaccaacagcacgataaatttgcggcgctgctggagctggaaacgcgctactgtcgccaggagccgtatattagcttaggccgttatattcacgtcaccgcgcttaagccgcagatgcaaggataaactatgagtgaattttcccagacagtccccgaactggttgcctgggccaggaaaaatgatttttctatttcgctgccggtcgacagactctcttttctgctggcgattgccacgctgaacggcgagcggatggaaggggaaatgaccgagggagaactggtggatgcgttccgccacgtgagtgatgcgtttgagcagaccagcgaaaccatcagccagcgcgccaataatgccattaacgatatggtgcgccagcgtctgctgaaccgctttaccagcgaaatcaccgagggtaacgctatttatcgcctgacgccgctgggcattgggatcaccgactactatattcgccagcgcgagttctccaccctgcgactgtcgatgcagctctccatcgttgccagcgaactcaagcgcgccgccgactcggcagaagagggcggcgatgagttccactggcatcgtaacgttttcgctccgctgaagtactcggtagcggaaatctttgacagcatcgacctgactcagcgaatcatggatgagcagcagcagctggtgaaagatgatattgcccagctgctgaacaaagactggcgggcggcgatctccagctgcgagctgctgctgtcggaaacgtccggcaccctgcgggaactgcaggataccctggacgcggcgggcgataagctgcaggcaaacctgctgcgtatccaggattcgaccatggcgcgcgacgatctgaattttatcgatcgtctggtgttcgatctgcaaagcaagctggaccgtatcgtcagctgggggcagcaggcgattgacctgtggatcggctacgatcgccacgtgcataaatttatccgtaccgccattgatatggataaaaaccgcgtcttcgcacagcgtttgcgtcagtcggtgcaaacctacttcgacgccccctgggcgctcacccatgcgaatgccgatcgtctgcttgatatgcgcgatgaagagatggcgctgcatgatgaagaggttaccggggaacttccaacggatctggagtacgaagagtttaacgaaattcgcgaacagctggcggcgctgattgaaggacagctggtggtctataaagagaagggactgccgctggatcttggcctggtggtacgcgaatatctgtcgcagtatccgcgcgcgcgccactttgacgtcgcgcgtattgtggtcgaccaggcggtacgtttgggcgtagcgcaagcagatttcaccggactgccggcaaaatggcagccgattaatgattacggagccaaggtacaggcgcatgtcatcgacaaatattgaacaagtgatgccggttaaactggcgcaagcgttggctaatccgttatttccggcgctggatagcgccctgcgcgcgggccgtcatatcggccttgacgagctggataatcacgcatttttaatggattttcaggattacctggaagagttttatgctcgctacaacgtcgagctgattcgcgcgccggagggttttttctatctgcgcccgcggtcgaccacgctgatcccgcgctcggtgctctccgagctggatatgatggtgggtaaaattctctgctatctctacctcagcccggagcgtctggccaacgagggcatcttcactcagcaggagctttacgacgagctgctgaccctcgcagacgaagccaagctgctcaagctggtcaataaccgttctaccgggtccgaccttgaccgccagaagctgcaggaaaaaatgcgcgcttcgctcaaccgcctgcgccgcctcggcatggtgtggtttatgggccatgacagcagcaaattccgcattaccgaatcggtgtttcgcttcggcgccgacgtgcgcgccggtgacgatccgcgcgaagcccagctgcgtatgatccgcgacggtgaagcgatggcgctggaaaatcgcctgcagcttaatgatgagaatgaagagaatcagccggatagcggggaggaagagtaatgattgaacgcggtaagtttcgctcgctgacgctggttaactggaacggtttttttgcccgtacttttgatctcgatgaattagtgaccacgctttccggtggtaacggtgccggtaaatccacgaccatggccgccttcgtcaccgcactgatcccggacctgacgctgctgcactttcgtaacaccacggaagcgggggcgaccagcggctcgcgcgataaaggcctgcacggtaagctgcgcgctggcgtctgctactccgtgctggacgtgatcaactcccgccaccagcgcgtggtggtcggcgttcgtctacagcaggtcgccggtcgcgatcgtaaagtcgatatcaagccttttgcgatccagggcctgccaacctccatccagccaactcagctgctgaccgaaacccttaacgagcgccaggcgcgcgtggtgacgctcaacgagctgaaagataagctcgaagcgatggaaggggtgcagttcaagcagtttaactctattaccgagtatcactcgctgatgttcgacctgggcgtggtggctcgccgcctgcgttcggcttcggaccgtagcaaatactatcgcctgatcgaagcctcgctgtacggcggtatttcgagcaccattacccgctcgctgcgcgactacctgttgccggaaaacggcggcgtgcgtaaggcgttccaggatatggaagcggcgctgcgtgaaaaccgcatgacgctggaagctatccgcgtgacgcagtcggaccgcgacctgttcaagcatctgatcagcgaagccaccaactacgttgccgccgactatatgcgtcacgctaacgagcgacgcattcatctcgacaaggcgctggagtatcgtcgcgatctgttcacctcccgcgctcagctcgcggcggaacagtataagcacgtcgatatggcccgcgagctgcaggaacataacggcgcggaaggcgatctggaagccgattatcaggccgccagcgaccatctgaacttggtgcagaccgctctgcgccagcaggaaaaaatcgagcgctatgaagcggatcttgatgaactgcagattcgcctcgaagaacaaaatgaagtcgtcgcggaagcggttgaccagcaggaagagaacgaagcccgcgccgaagccgccgagctggaagtggatgagctgaaaaaccagcttgccgactaccagcaggcgctggacgtgcagcagactcgcgcgattcagtacacccaggcgctgcaggcgctggagcgggcaaaagccctctgccatctgccggatttaacgccggagagcgccgacgagtggctggaaactttccaggcgaaagagcaggaagcgacggagaaaatgctgtcgctggaacagaagatgagcgtggcgcaaaccgcgcacagccagtttgaacaggcttaccagctggtggcggagatcaacggcccgctggcgcgtaatgaagcctggaacgtggcgcgcgagctgctgcgcgaaggcgttaatcaacgtcatcaggccgaacaggcgcacgggctgcgcagtcgtctgacggagcttgaacagcgtctgcgtgaacagcaggatgccgaacgccagctcaatgagttctgtaagcgccagggcaaacgctacgatatcgacgagctggaagccctgcaccaggagctggaagcccgcatcgcatcccttgccgacagcgtttccaccgccagcgaacggcggatgaccctgcgtcaggagctggaacagctacagtcgcggacgcaaacgctgatgcgccgcgcgcccatctggctggcggcgcagaacagcctcaatcagctgtgcgagcagagcggcgagcagtttgagtcaagccaggacgtcaccgaatatctccagcagctgctggagcgtgaacgcgaagctatcgtggagcgcgatgaagtcggggcccgcaagcgcgctatcgacgatgaaattgagcgtcttagccagccgggcggttcggaagatcagcgcctgaacgcgctggcggaacgttttggcggcgtactgctgtcggaaatctacgatgacgtgagtctcgatgatgcgccgtattactccgcgctctacggtccttcccgccacgccattgtggtaccggatctgtcgctgattgccgatcagctggaaggtctcgaagattgtcccgaagatctctacctgatcgagggcgatccgcagtcgttcgatgacagcgtattcagcgtcgatgagctggaaaaggcggtggtcgttaagattgccgatcgtcagtggcgctattcacgcttcccgacgctgccgctgtttggccgcgccgcgcgtgaaagccgcgttgaaacgctgcacgccgagcgcgaaagcctgtccgagcgctttgcgaccctgtcgtttgatgtgcagaaaacccagcgcctccatcaggcgttcagccgctttatcggtaaccatcttgcggtagcctttgaggacgacccggaagaagaaatccgtaaactgaatacgcgtcgcggcgaactggagcgggcgctgaccgcccatgagagcgataaccagcagaaccgggtgcagtatgagcaggcaaaagagggcgtatccgcactcaaccgcctgctgccgcgtctgaatttgctggccgatgactcgctggccgatcgcgtggatgagatccaggaacgcctggacgaagcgcaggaagccgcgcgcttcgtccagcagcatgggaatcagctggcaaaactggagccgatcgtttccgtgcttcaaagcgacccggagcagtttgaacagctgaaagaagattacgcctattcgcagcagactcagcgcgacgcgcgtcagcaggcatttgcgctgaccgaagtggtgcagcgtcgcgcccactttagctactccgattccgcagagatgctgagcggtaatagcgatctgaacgagaagctgcgccagcgtctggagcaggctgaggcggagcgcgcccgtactcgcgaagcgctgcgtacccacgccgcgcagctcaaccagtacaaccaggtgctggcatcgctgaaaagctcctacgacaccaagaaagagctgctcaacgacctgcataaagagcttcaggacattggcgtgcgcgccgacgccggcgccgaagagcgcgctcgtctgcgccgcgatgagcttcatgctcagctcagcaacaaccgcgcgcggcggaaccagctcgaaaaagcattgaccttctgcgaagcggaaatggataacctgacccgcaggctgcgcaagctggagcgcgattattgcgaaatgcgcgaacaggtggtcagcgctaaagccggctggtgtgcggtcatgcgcctggtgaaagacaacggcgtggagcgtcgcctgcatcgtcgcgagctggcctacctttcggcagatgaactgcgctcgatgtcggataaggcgctcggcgcgctgcgtctggcggtctcggataacgaacacctgcgcgatgtactgcgtatttctgaagatccgaaacgtccggagcgtaaaatccagttctttgtcgccgtttatcagcatctgcgcgagcgtattcgccaggatatcatccgcaccgacgatccggtggaagcgattgagcagatggagatcgaactcagccgtctgacggaagagctgaccaaccgcgagcagaagctggccatcagctcccgcagcgtggccaatattatccgcaagactatccagcgcgagcaaaaccgtattcgtatgctcaaccaggggctgcagagcgtctccttcggccaggtcaacagcgtgcgtctgaacgtcaacgtgcgggaaacccactcgatgctgctggacgtgctgtcagaacagcatgaacagcatcaggacctgtttaacagcaatcgtctgaccttctcggaagcgctggcgaagctgtatcagcgcctcaatccgcagattgatatggggcagcgtacgccgcagaccatcggtgaagagctgctggactaccgcaactatctggagatggaagtggaagttaaccgtggttccgacggctggctgcgcgcggaatccggtgcgctatcgaccggtgaggctatcggtaccgggatgtcgattctggtgatggtagtacagagctgggaagatgaatccatgcgcctgcgcggtaaggacatttcgccgtgtcgtctgctgttccttgatgaagcggcgcgtctggatgctcgctctatcgcgacgctgttcgagctctgcgatcgtctggagatgcagctgattattgcggcgccggaaaatatcagcccggaaaaaggtaccacctataagctggtgcgtaaggtcgtgaataatcacgagcacgtgcacgtcgtcgggctgcgtggcttcgcaccgcagctgcccgaaacgctgccgggaacggcaaatgcttcataggatggtacaataaccagccaaagggcgacgcgatgtcgccctttttgttatccgttcctgtactttaggattgtataatcttttaacttctttacatttgggaaggcaaaagcgttttcgtcttcatatactgaaagtaagccccattttagcgggcagcaatgtgttaacagggggcaagggatgttgctaaagaaacggtatggtcgtcaattgtctgcgctcagcctgagcctggcatttgcatttgctccactgttcaatgtccaggctgaagagcctgaagtggtaccatcggatagctctgccaccatcagcgagctctcttccgcgctaagccaaagcgcaaaccaatccgcggcggtcgcccaaatggccggcgagcaggcgctttctgccgatgcggcagcgaagagccgcgccgggattcaggcgatactgccgtccggttatcaacccgtatttatgaatccgctggtatcgctgtatgcggccagggatatgaaaccgatgtgggataaccgcgaggcggtgcaggcgtttcaacagcagctggctgaggtcgctatcgccggttttcagccgcagttcaccacctgggttgagctgttgaccgacccggcagtgaacggtctggcgcgggatgtcgttctgtctgacgccatgatgggctatctgcattttattagcggtattccgactcagggcaaccgctggctgtatggcacgaaaccgtatgccatgtcgacgccgcctctgtcggtgattaaccagtggcaggtggcgctggataacggttcgctgccgcagtttattgcgggtctggctccgcagcatccgcagtatgccgcaatgcatcaggcgctattagctcaggttgccgattcccgtccctggccgcagctcaccggtaagacgtcgctgcgcccgggggaatggagcaacgatgccggcgcgctgcgcgaaattttacagcgcaccggtatgctggatgacgcggcaaaaattgcgttgcccggtgatgaggtggtgagtccgtccgccgggaaaaaggccaaaagcagcggccgtggcgtttacgatcgccagttagtggagggcgttaagcgcttccaggcgtggcagggactgggcgcagacggcgtgattggtcaggcgacccgcgactggctcaacgtttctcctgcgcagcgcgccggcgtgctggcattgaatatccagcgtttgcgcctgctgccgggtaatctggcgaccggaattatggtgaatattcccgccttttcgctggtctattaccaggacggtagccaggtgctggcatcgcgggttatcgttggccgtccggatcgcaaaacccctatgatgagcagtgcgctgaacaacgttgtggtcaacccgccgtggaacgttccgccgacgctggcgcgcaacgatattctgccgaaggtgcgcaataacccaggctatcttgagcagcacggctatacgatgatgcgcggctggaatagcaaagagactatcgacccgtatcaggtggactgggaaacgataaccgcatcgaatctgccgttccgcttccagcaggctcccggcgcgcgcaattcgctggggcgctataaattcaatatgccaagttcagatgcgatatatttgcacgatacgcccaatcacaatctgttccagcgggatggacgcgcgctgagctccgggtgcgtgcgcgtgaataaagcctcagaactggccaatatgctgcttcaggatgctggctggaatgatgcgcgtatttcagatgcgctaaaacaggggaatacccgctacgttaatattcgccagaatatcccggttaatctctattatttgaccgcgttcgttggcgctgatgggcgtacacaatatcgaacagatatttacaattacgatctcaccgcgcgatccagcgcacaaattctacctaaagctgaacaattaatcagataaatgaagtagttcaacggatttggttgtcctacctctgtgtgaaaacgggccttgcacgctgcaaggcccgagtttactggggttaggctaccttgacgttggcaataatgcccggtaaggtgcctttcgtgcgccagaagtgcatatacatataatcctgcaaaggcgctgtggcagtaagcagcccgttctccatagctgatatttattagccgtaggggagcgagtgcgtgctggcggctaacgggcgcgttgcgggaaaagtatattacgattcatttacctgtagacctgattatcatggacaaatttgacgctaatcgccgcaaactgctggcgttaggtggagcggcgctcggtgctgctgccattctgcctgcgccggcatttgccaccctctcgaccccccgaccgcgtattttgacgctgaacaacctgcataccggtgaatcactcaaggcggagtttttcgatggcagaggctatattcaggatgaattagcaagacttaatcattttttccgtgattatcgcgcgaataagattaagtccatcgatcccggtttgttcgatcaactctatcgtttgcagggattacttggtaccaacaagcctgtccagcttatttccggttatcgttctgttgataccaataatgagcttcgcgcgcgtagccggggtgtggcaaaacacagctaccacactaaaggccaggccatggattttcatattgaaggcatttcgttaagcaatgttcgcaaagccgcgttatctatgcgcacaggtggtgtaggatactacccacgtagcaactttgtgcatattgataccgggccagtacggcactggtaacgaaaggagcctcatgaactatcgtattattccggttaccgcgttcgcgcagaactgttctttaatctggtgtgaacaaaccaaactggcggcgctggtcgatcccggcggtgatgctgagcgaatcaaacaggaagtcgcggcggcaggcgttagcctgatgcagattctgctcacgcacggtcatctcgatcacgttggtgcggcggcggagctggcacaacattatggcgtgccgattattgggccggaaaaagaagatgagttctggctggaaggattaccggcgcagagccggatgttcggtctggaagattgccagccgctgcagccagatcgctggctgaacgaaggcgatacggtcagcgtggggaatatttccctgcaggtgctgcactgcccaggccatacgccggggcacgtgatcttcttcgatcctgcttcccgactgttgatttctggcgatgtgatttttaaaggcggagtagggcgtagcgacttccctcgcggcgaccatagccaactgatcgatgcgattaagcgcaagctgttgccgctaggcgatgacgtgtcgtttattccgggtcatggaccgatgtcgacccttggctatgagcgtctgcacaacccattcctgcaggatgaaatgccggtctggtgacctaaaccagcatataaaaaaggccgcacatgcggccttttgtttgccctgcgctgagattacagtacggcaacaatcgcttcgcacagcggcgccatgttgtcgggcgtcataccggcgacgtttatacgtccggacgccaccgcgtaaattccgaactcttcacgcagacgcagtacctgctctttggtcaggccgctgaacgagaacatcccgttttgctgaatgatgaaagagaaatcgcggctggcgcctttttcctgcagggtattaacgaaaagcagacgcatacgctggatgcgttgacgcatgtcggtcaactcttgctcccagatggcgcgcagtgcgtcattgctgagaatggtcgccactaccgaggcgccgtgagcgggcgggtttgagtagttcgcgcggataaccgacttcatctggctgaaagcgcggtctaccgcttcctggtcagcggcgaccagcgtacaggcgcccacgcgctcgttgtacaggccgaagtttttcgagtaggagctggcaaccagcagctctttatgcagagcggcgaaagcgcgcaggccttcagcatcttcttccaggccgcgggcaaagccctggtaggcaaagtcaaacagcggcagccagcctttctctacggagagctgcgccagctgttgccactgctccagcgtcggatcgataccggttgggttatggcagcagccgtggaacagaaccacgtcgccggcctgcgcttcggtcaggctggccagcagcccgtcgaagtcgagtttgtggttagcggcatcgtagtaggtatattcgcgaacttccagcccggctgaattgaacacgcttttatggttcggccagctggggttgctcacccaaatacgtttaacgtcggtgttcttcgccagaaaatcggcggcgacgcgcaggccacctgtaccgccgggcgtttgcgcggtgcgggcgcgtttatcattgataattgcgcttcctttcccgaacagaagctcctgggtgcagcggccaaattccggaataccatcgatacccagataatttttagtggtttcattttccagcagatactgctctgcttttttcacgctagtcaggaccggtgttttacccgtttcatctttataaacaccaattccaagattaatttttgttgggcggtcatcggcacgaaacagatcggccaggcccagaattgggtcggcaggggcggcggtaatgttctcaaacatgacgaggttccattgtgattactgaagggaaatccgctatcaggttaacgggagttatgttaattgccaaccgtttgcgacaaaaagcgagaaggtttttgaaagttacgatcttcctctcaggaaagcagaaaagcaggaccgaagtcctgctttttaggcatatcacgaaggggtgtactgcagattagaactggtaaacgatacccactgcggcctggtcgtcggtcgcaacgccagcggctttggtgtaatcgttgtcgttcagctggttgaatttatacgcagcgtagacgttcatgtttttgttgaagtagtaccaggtacccacttcgacgtatttaaccaggtcagcatcgccgccggagaagccagcgcgggagcgcaggtctttacctttagtctgtacgtagccgatggacggacgcaggccgaagtcgaactgatactgaacaacggcttcgaagttctgagttttgttagcgaagtagttgccttcgttttccggcgtcatgttgtaagtctgggagtacatgaccgcagcatagacgttgttcgcgtcatacttagcggaggttgcccatgcttcagctttttcgccctgacggtcagctttctgatcgccgctacggttggagttcgcatagcctgcagacagcgcaatgccgttgtcaaacgcgtaggttgccgcggtgctgaagccgtcgccgttttgtttcttaacatcacggctggaagcgtcgtttttaccctggtactgcagcgcgaagctcaggccgtcaaccagaccgaagaagtcagagttacggtaggtggctacgccgttggtacgcgcggtcatgaagttgtcggtgtagctccagccgtcgccgccccattcaaccagcatatcggttgccgcttcaacgtcgtagatggcgccgtagttacgaccgtagtcgaatgaaccgtattcaccggcttttaagcctgcgaaagccagacgagttttggtggtctgtttaccttcaacattggacgcatccatgttgtattcccactgaccgtagccgaccagctgatcgttgatctgggtttcgcctttcagaccgatacgggcgtaggtggtatcatcgctgctggtgtcgccgttggtggtccagacgtgctcgccaaccatttttccgtagaagtccagtttgttgccgtttttgttatagatttctgcagcgttagctgcaccggctaccagcagggcaggaattaccgctgccagaattttgcgcttcatcattatttattaccctcatttatatttttttatgaacacttgccactgccgtcaataagtttcgtcaataaaaatttacagaactattgatgatagtttggtgtctggaggcatctttccattcagaacaacgtttcgctagcctgaaaatgctaccaatatcgcatatgagtaacaaaaggaaattctatgtaactaaatatgtatttttgggaactttgtgaactcaatcaacattccgcccctgttcgccgattaaatcacctgtctttatatatctatatgaattaattatgattaatttagataagagagggtttgtgcattttacgtcagcattttgctttatttttattcaaatcttgtcgttgcaagttgtgctgtggctggttaaaaaacgagcaatataatcagcatgtttgccaatttatgaacataaggtgcggttttaattagcggtcgctaatgaaatagtgcgtaacataattgtgaatcaggatggttgatgtttaagtttcctgatattcgttaacgtaaattgacataaaaaaaggccagcttgcgctggccctggatgaaaattgcagaaaaaaatcagaaagtcgcgttacgcggggtccgcgggaacggaatgacgtcgcgaacgttctgcacgccggtcacgtaggcgataagacgctcaaagcccagaccgaaaccggagtgcggtacggtgccgtaacggcgcaggtcgcgataccaccagtagtcttctttattaagacccatttccgccatacgcgcgtcaagcacgtccagtcgctcttcacgctgggagccaccgataatttcaccgatgcccggcgccagaacgtccattgcggcgacggttttaccgtcttcgttaaggcgcatatagaacgccttgatgtctttcgggtagtttttcaccaccaccggagctttaaagtgctcttccgccagatagcgttcgtgctcggaggagagatccacgccccagtagaccgggttttcgaacgacttaccgcagttttccagaatggtgaccgcgtcagtgtaatcaacctgggcaaaatcagcggaaacgaaacgctgcaggcggtcaatagcgtctttatcaacgcgttcggcaaagaactgcatgtcgtctgcgcgctcttcgagaacggctttgaagacgtacttcagcatcgcttccgccagacctgccacatcgttcaggttagcaaaggcgacttccggctccagcatccagaactccgccaggtggcggctggtgttggagttttccgcacggaaggttgggccaaaggtgtagattttggacagcgcgcaggcgtaggtttcgccgttcagctggccggaaacggtcaggaacgactctttgccgaagaagtctttatcgaaatcgactttgccctgttcgttgcgcggcaggttttccagatccagcgttgacacgcggaacatctcgccggcgccttcagtgtcggaagcggtaatcagcggagtcgaaacccagaagaagccctgctcgtcgaagaaacggtgcagcgcctgcgccagggtatggcgaacgcgcgccaccgcgccaatcaggttggtgcgcgggcgcaggtgggcaacttcacgcaggtactcgatgctatggcgtttagccgccatcggataagtatccgggtcttccacccagccgctgacttccacgtggctggcctggatttcaaagctctggccctggccctgagatgccacgactttaccggtcaccacgaccgagcagccggtggtcaggcgcagcacttcctgattgtaattgggaagagaattactaataacggcctgtacaggatcaaagcaggaaccgtcatagacggcgaggaaagaaaagccagctttagaatctcggcgggtacgcacccatccgcgcacggtgacttcgctgtcaacggcaacgcggccctggagtacgtcggctacaggcacaacgctcataatagtctctcttgttagtccaatagaaaaatctgtattcccctgcaacagggggatatctatgttacctgtcatcttccatcagacaagtagatttcgcacaagaaaggggggttttaggaaataaataaggagatagcctactttgctgcgtgagagcctgatattcagagagattcgttcagcgcgatgatcccatgcagggcgaacggggttcttaatgcctgataacgtctcggggtgataagcggaggcgaataaaaatgcgcccgttttggcggacgcattttgtctttatatgacctagctggcttttttaaccggcggtagatcgaaggctttgcgcagcgcgcggacgaaagctttatcgtgacaaatcgttttacccgggctatccgaaagtttcgccaccggtttaccgttgcactccaccagcttgataacaatattgagcggcttcacctgaggaatatcgcaggttaaacgcgtgccgataccgaagctcagattcacccgcgatgagaagtggcgatagagatcaaccgcttttgtcaggttgagattatcggaaaataccagcactttgctcagcgggtcgatgcccagctttttgtagtgggcgatagccttctcgccccattccaccgggtcgccggagtcgtggcgcagcccctgatagcgggtcgcaaactccggcccgaaatcgcgcagaaaagcgtccatcgtaatgcagtcggtcagcgcaatccccagccgatcgggatactcttccagccaggcagcgagagccgcgcgctggctgctcgccaggttcgggctgatctgctgatgcgcctggaaccattcgtgagcctgggtccccattggggtcaaattcaaacgccgcgccagatcgtaattgctggtaccggtgaaccaggattcttgctgaagacgctgaacaatcgcctgctgcacctcgcgggagaagcggcggcgggtaccgaaatccatcaggcggaagcccgacatatcgatatcagcagtgaggcggttaaagtcagtcagcttatgctcaagggtgtccagcgcgagatcgacgctgatttccggcgagcgatagcgatgtaccagctcgcttatcaccgccagcagcggaacttcccacataataacttcaagccaggggccggaaaggcgaatattcagcttgccgttgtcattgatgaccgtgacctggcgcgggtcgtagcggaagccgcgtagccactcgagatagtctggcgcaaagaagggcaggctcgacaaccagtgatattcatcgtcctgcagtctcaggtcgcgcatcgtctcaacctgctcgcgaatcgcatcggcgtagatgccgagcagatcgtccccgcggcagcggaactccgccgcaacctgtacatcattgtagcggtggaagacagcctgctgcatgtgcagcttgtaggcatccgtatcaagcaacgagtgcagtacaggagaagtgaattgggtcatggtgcgcagtagcatcctctcactggagcgtttccatcaaaaccaaagcggtaaaaggaggcggagtatacctgtaatacccgacgctgtcccgcggtgacggctgatggcgacgctgacggtcatttgcgaggcctagtttaatatattgaacacgcatcacaccacaagctttgcgcctggtcgagcgcatttcgtgcctcttgtgttatcaaaatgtagcaattttcatgtttagcattgaaaagatgaagattctgcatagcgagatttgcgcaacaggaatagactgagtcgacactttacaggacacgctaaaggttttttatgacacaacagccccaagccaaataccgccacgactaccgtgagccggagtatctgattagcgatatcgatttgacctttgacctggatgccgcgaaaaccgttgtgacggctgagagcaaggtctcccgccacgcggctacgtctgatgtgccattgcgtctggatggcgaagacctgacgttggtctctctgcggattgatggtcagccgtggagcgactacaaggaagaaaataaccagctggtgattagcgggttgccggaacatttcactctgaccatcgtcaatgaaatcagcccggcggcgaataccgcgctggaagggctatatcagtccggcgaagcgctgtgtacccagtgcgaggcggaaggcttccgccacattacctggtatccggaccgcccggacgttctggcgcgcttcaccaccaaaatcatcgccgataaagcaaaatacccgtttctgctctccaacggtaaccgcgtggcccagggcgagctggaaaatggccgtcactggatccagtggcaggacccgttcccaaaaccgtgctacctgtttgcgctggtggccggtgattttgacgtcctgcgcgataccttcaaaacccgttcggggcgtgaagtggcgctggagctctacgttgaccgcggtaaccttgaccgcgcgccgtgggcgatgacctcgctgcaaaattccatgaagtgggacgaaacccgctttggtctcgagtacgacctcgacatctatatgattgtcgccgtcgacttcttcaacatgggcgccatggagaacaaaggccttaacgtctttaactccaaatacgtactggcgcgtaccgataccgcgaccgataaagattacctggatatcgagcgcgtgattggtcatgaatatttccataactggaccggcaatcgcgtgacctgccgcgactggttccagcttagcctgaaagaggggctgaccgttttccgcgatcaggaattcagctccgacctcggctcgcgcgcggtgaaccgcattaataacgtacgcaccatgcgcggcctgcagtttgccgaagacgccagcccgatggcgcatccgattcgcccggatagcgtgatcgagatgaacaacttctataccctgacggtgtatgagaagggagcggaagtgatccgcatgctgcataccctgctgggcgaagaaaatttccagaaaggcatgcagctctattttgagcgccacgacggcagcgccgcgacctgcgacgactttgtccaggcgatggaagacgcttccaacgtcgatctgtcccacttccgccgctggtatagccagtccggtacgccaattgtcaccgtccatgatgactacaacccggaaacggagcagtacacgctgaccatcagccagcgcacgccgccgaccgctgagcaggcggagaagctgccgctgcatattccgttcgacatcgagctgtacgataacgaaggcaaggtaatcccgctgcagaagggcggtcacccggtgcatcacgtgctgaacgtcacccaggcggagcagacttttgttttcgacaacgtttacttccagccggtcccggcgctgctttgcgagttttccgcgccggtgaagctggagtacaaatggagcgatcagcaactgaccttcctgatgcgccacgcgcggaatgatttctcccgctgggacgcggcgcagagcctgctggcgacctatatcaaactcaacgtcaaccgtcaccagcaggggcagccgctgtctctgccgattcacgtcgccgatgcgttccgcgcgattctgctggatgagaagatcgatccggcgctggcggcggagatcctgacgctgccttcagcgaatgaaatggcggagctgtttgcgattatcgatccgcttgccatcgcggcggtgcgcgaagcgctgacccgcacgctggcgaaagagctggctgacgagttcctggcggtttacaacgccaacaagctcgacggctaccgcgttgagcatgccgatatcggtaagcgttctctgcgtaatacctgcctgcgctacctggcgtttggcgataccgagctggcggataaactgattagcgcgcagtatcaccatgcggacaatatgaccgacgcgctggcggcgctggccgcggccgtagcggcccaactgccgtgccgcgatgcgctgatgcaggagtatgacgacaagtggcaccaggacggactggtcatggataaatggtttatcctgcagtccaccagcccggcggataacgtcctggagacggttcgcggcctgttgcatcatcgctcgtttagcatgggtaacccgaaccgcgtccgttctctgatcggcgcctttgccggcagcaacccggcggcgttccatgcagaagacggcagcggctatcagttcctggtcgagatgctgactgagctgaacagccgcaacccgcaggtggcttcgcgtctgattgagccgctgattcgtctgaaacgctatgacgagaaacgtcaggcgctgatgcgcggggcgctggagcagctgaagggtctggagaatctttccggggatctgttcgagaaaatcagtaaagcgctggcgtaacgccagcgcgagtccaaacctgtagccccgctaagcgcagcgcgagcgggggaacgtcgcagtcgttaaccgtggctcactaagcgtggcgaggatttgttcttgccgcgctgcatcacccgattcagtacttccgcttccagttcggccagcttcactgaacccgtgcgtcgcggacggggaatgtccaccagcagatccagccctatcttcccctcttcaatcagcaaaacgcgatcggccatcgccaccgcctcgctgacgtcgtgggtgaccagcagaacggtaaatccgtgctcctgccacagcgagacaatcagatcctgcatctccaggcgagtgagggcgtccagcgcgcccagcggctcatcaagcagtaataatccggggcgatgaattaacgcgcgagccagcgccacgcgctgcttttgcccgccggaaagcgccgcgggccactcaccggcgcggtcttcaaggccgacgctcgccagcgccttgagcgccgcctcgcgccactgccccttcagcccgaggccgacattgtcgatcaccgttttccacggcagcaggcgggaatcctggaacatcatccgggtatcctcctggatttgcgccagcggcgtcgaacccgccagcagctgcccggcgttgggtttttccagcccggccagcagccgcagcagggtgcttttaccgccgccgctgcgtccgaccaccgcgacaaattgcccggtgggaatatgcagatcgagttcattcagaatcgtcttgctgccgtaacgcttgcttacgccgtttagcagcagcgggatccccggattaagacgcgcggttgtcatgcgttggcctcctgaaggtggtaagccggattccagcgcagccagacgcgttcaagaagctgtgcgctgaagtcggccagtttgccgagaatagcgtaaagaataatggcgacgaccacgacatcggtctgcagaaattcgcgggcgttcatcgccagatagccgataccggcgttagccgagatggtttcagccacgatcagcgttaaccacatcaggccgagcgcaaaccggatgccgaccataatggagggcagggcgcccggcaggatcacgtgacggaacagagcaaaacccgataagccatagctgcgggccatctccaccagacccctgtcaatgtttcgaataccgtgccaggtgttgatataaatcgggaacatcgtccccagcgccacgaggaaaattttggcgctttcatcgatgccgaaccataaaatcaccagcggaatcagcgcgaggtgcggcacgttgcgcagcatctgaatcgaggtgtccagcaggcgttcgccccagcgcgacaggccgctgataagcccgagaaccaggccaatggaaccgccgatgctgaaaccaataagcgcccgccatgagctgatggccagatgttgccaaagctcaccgctggcggagagcgtccagaaggctttgagcaccccttccggtgacggcaaaatacgggtagagagccaaccaacggaagaggcgaattgccatacaatcacgctgccaaccggcaaaagccagggggctatgcggatcaggagtttttgcgaaagcgtcgccatacagtgttcctttattctttagcgttttgcctggtgacgggcatcaacgctgaactttaaacgtgctcaacccgctgtaaggttttcagcgccggcgcgcggctgctggggcgatgcagcgcctgccagaaggtttccagcgcctggtcgaggcggccctgcagattcggggtaaactgcggtttatgctgataatccgtgacctggctatcgtcagcgaaaacgccgtggaggatctcctgggctttcagcgcgttgagtaccggttttaaggcgtaatccaccgccagcatatgggcgatggttccgccggtagccagcggcagaacgattttgccctccagcgcgcgctccggcagcaggtccagaagcgtctttaacgcgccggaaaaagaggccttatagacgggcgtcgcgatgatcagcccatcggcgccggcaagctgttcatttaacgcatggagggctgggttatcaaagcgagcgtagagcaggtcttccggagcgaaattctgcagatgccagtggcagacctcgatatccgccgcagagagcgtctctctggcgtattccagaagcgcgctggagcgggaagggtagcgcgggctgcccgcaagtgtgatgactcgcatactctctccttataactaaatatttgcatttatctataattgataacatttagccgtagtgtgacagagcgcttttatttccctaaatgatttatccggcgttggattgtcagaaagtgcataacgagcgggagaaaagtaaacgtttgcgtcggaggtaagattttttgtcgtaggtcaattccctttccggggtggatcgcacataatacgcccccggtttgcacaccgggaatccaggagagttcatgtactaccccttcgttcgtaaagccctttttcagctcgatcctgagcgcgctcatgaagtcacttttcaacaattacgccgtgtttcgggtaccccgctggaaatgttggttcgccagaaggtgccgacaaagccggtaacctgtatggggctcacatttaagaacccgctgggcctggccgccgggctggataaaaacggcgagtgcattgatgcgctcggggcgatgggttttggttccattgaaattggtaccgtgacgccgcgtccacagccgggcaacgataagccaaggatcttccgcctggtcgatgccgaaggtttgatcaaccgcatgggctttaataaccacggtgttgataacctcgtggagaacgtaaaaaaggcgcattttgacggcattctgggtattaatattggcaagaataaagatacaccggtagaacaaggcaaagatgattatctgatttgtatggaaaaaatctatgcttatgccggctatatcgccattaatatctcctcgccgaataccccaggcttgcgtactttacaatacggggatgcgctggacgatttgctttctggtattaaaaataagcaacgcgagctacaagagaaacatcaaaaatatgttcctgtggccgtaaagatcgctccggatctttccgtcgaagaattgatccaggtagcggacagtttagtccggcataatatagatggcgtcattgccaccaataccactctggatcgatcgctggtacaggggatgaaacattgtgatgaaaccggtggccttagcggacgtccattgcagctgaagagtacggaaattatccgcatgctgtctgcggaattaaatggccgcctgccaattatcggagtcggcggtattgactcggtgattgccgcccgggaaaagatagccgccggagcgacgctggtgcagatttattccggatttatttttaaaggcccgccgctgattaaagaaattgttacccatatctaatcttttcccccctctgatactcctccagggctttatttatagccctggttgttttatattccttcattgttgcttatttagacattttagtcttttcttaatttttgaaatattctgtagcagtttacctgtttattacagacggaagtggaagaggacgggggtagaaatgcggatcaaacctgacgataactggcgctggtattacgatgaagagcatgaccgcatgatgctcgatctggctaatggtatgttattcagatcgcgctttgctcgccgcatgttgacgcccgacgccttcgcgccttccggattttgcgttgatgacgcagcgctctatttttcatttgaagaaaagtgccgcgatctcgaattatcaaaagaacagcgcgctgaattagtactcaatgcgctggttgcgattcgttttctcaagccgcaaatgccgaaaagctggcatttcaacacgcatgaagagagctggcagccaggcgttggcgatgccgccagcgcatggctcagcgataccggccagcaggtgaatctgctggtggttgagcccggagaaaacgccgcgctgtgcctgttagcccagcccggtctgacgcttgccgggcgggtgatgcagctcggcgacgtgattaaaattatgaacgacaggctgcagccggcgccaggcgtcgccagctacagcctgggtcaggcggtttaaggcgccagcctcaccgcggttttcggcacgcagctacagcataaaatggtgccatctgcggcgaccgcgtttttcttcagcgcgctgacttctccttcttccagccggatgcggcagctgccgcaaatcccagcccggcaggagtaaggaatacgaattccctgttgttccagctgctccagcaagatttgctgattattaccggtaaaactcactccctgccacgctatttccaccgtcgcgttctcctgcgcttcaggtgccggcgtagtatcactctcgcctgcgccgtaggccttcgccgggccgctggccagcacttctaacgcatcgcccacgcggattacgccgctatttcgcgcgatcaggttctggccaaaatcgacatcgccgttatccagcgccgtgcggaaacgctgcagcgtgcttaagggctccccggaaggatgcttttgcccgcgctccgggctgacggtggtcaatacgcagcggctgcacggtttgacgacatcaaaaatgacctcgccaatgcgcaccactttccacgtatcttcttcccaggcggccgcgccggtcaccagcagatttgggcgaaattgttctatgcttacgctggccggacagcgattttgcagatcgcgcagcgaggcctcattggccagcagatagggaaaaccgtcggcaaaagagagggggacggcatcgtgacgttttaccctgcggctaagcgctggccccagccagcggagctgaacgctgcggttgaagaacccgcttagccactggttcacccggtccggggcaatcagggcggtaaaatggttgccccagacttcggtcggctcctgctgtatggagaaatcgctgaagcgcaccatcgcgctgctgccgtccggcgcggtcagatgcagaccatcatggagcggcgcgggaataaatttgaccatttgcggaaactggcgggcggtaatgaaggtgccatcggtttccgtcaccataaatatacgatcgaaggccagcccgctgctgtctgcataagcgtggctcaggccaattccccgcatcgatttgacgggatgaataaaaagtcgcgaaagggttaccatacgctgcccctggctttaaaaataagcctttaactttatgacatggggcgcatattggctataatgcgcaccaattttcttttagtaaaagtgacgatatgaattctctgtttgccagtacggctcgtgggctggaagagctgttaaaaactgaactggaagggctgggcgcggtggactgccagttggtccagggcggggtccattttcagggagatacgcggctgctgtatcaaagcctgatgtggagccggctggcttcgcggattatgctgccgctggggcagtgcagcgtatacagcgacctggatctgtaccttggcgtacaggccattccatggaccgagattttcactcaggatgccacttttgccgtgcactttagcgggctgaacgaagagatccgcaacagccagtacggggcgttgaaggtgaaagacgccatcgtcgacagctttacgcgtaagaatctgccgcgtcccaacgtcgatcgcgaaaatcccgatctgcgtattaacgtctggctgaataaagagaccgcgcatatctccctggatcttagcggcgaggggctgcacctgcgcggctaccgcgacggtaccggtatggcgccaatcaaagaaaacctggctgcggcgatagtgatgcgttccggctgggctgccggtacgccgctgctcgatcccatgtgcggttccggtacgctgctcattgaagcggcgatgctcgctaccgatcgtgcgccgggtttacaccgcggccattggggtttcggcggctgggcgcagcatgacgatgctatctggaaagaggtgaagtccgaagcgcaaacccgcgcccgtcaggggctggcggcgtatgagtcgcgcttttacggttccgacgttgacgctcgcgtcatcgaacgcgcgcagcgcaacgcccgccgcgccggtattggcgaactgattaccttcgaagtgaaagatgttgcccagcttagcaacccactgccgaagggcccttacggcacggtgataagcaacccgccgtacggcgagcgtctggagagtgaaccggcgctgattgccctgcatagcctgctggggcggatcatgaaaaatcagtttggcggctggaacctgtcgctgtttagcgcctcgccggatctgctgagctgcctgcagctgcgcgctgataagcagttcaaagcgaaaaatggaccgctcgactgcgtccagaagaactatcatcttgcggaaaacgaaggcggcaaaaccgcgatgctggcggaagatttcgccaaccgtctgcgtaagaacctgaaaaaatatgagaagtgggcgcgtcaggaaggcattgaatgctatcgcctgtatgatgccgacctcccggagtacaacgtcgctatcgaccgctacgccgattgggtggtggtgcaggagtatgcgccgccgaaaaccgttgacgcgcacaaggcccgccagcgcctgtttgatattatcgccgccaccattgccgtactggggattgcgccgaacaagctggtgctgaaaacccgcgaacggcagaaagggaaaaaccagtatcagaaaatgggtgaaaaaggtgagttcattgaggtgcaggagtataacgcacgtctgtgggtaaacctgaccgactacctggataccgggctgttcctcgaccaccgtattgctcgccgcatgctgggccagatgagcaaaggcaaagatttcctcaaccttttctcctacaccggtagcgccagcgtccacgccggccttggcggcgcgcgttccacgacgacggtcgatatgtcacgtacctatcttgaatgggctgaacgtaacctgcgcctcaatggcttaaccggccgcgcgcatcgcctgatgcaggctgatgtgctgggctggctgcgggagaccaccgaacagtttgatctgatctttatcgatccgccaaccttctccaactcaaagcgtatggatgatgcgtttgacgtacagcgcgatcatttgcgcctgatgaccgatttaaaacgtctgctgcgtaaaggcggcacgattatgttctcgaacaacaaacgcggtttccgtatggatcatgacgggctggcgcagctgggcctgaaggcgcaggagatcacgcaaaaaacgctgtctcaggattttgcccgcaaccgtcagattcacaactgctggctgattaccgcagcctgaaaggaataaagaatgtctttaattagtatgcacggcgcctggctctctttcagcgatgcgccgctgctggataatgctgaactgcatatcgaagataacgaacgcgtctgcctggtagggcgcaacggtgcgggtaaatcgaccctgatgaagatcctcaatcgtgaacagggtcttgatgacgggcgcattatctatgaactggatctggttgtggcgcgtctacagcaggatccgccgcgtaacgtgaccggaaccgtatatgactttgtggcggaaggtattgctgaacaagcggcatacctcaagggttatcacgatgtttcgcagctggtgatgaccgacccgagcgacaagaatctgaacgaactggcacgccttcaggaacagctggataatttagggctgtggcagctcgatagccgcattaatgaagtgctggaacagctgaatctggatcctaacgccgagctttcctcgctgtccggcggctggctacgtaaagcggccctcggccgcgcgctggtcagcgggccgcgcgtgctgctgctcgatgaaccgaccaaccatctcgatattgaaactatcgactggctggaaggtttcctgaagatgttcaaaggcaccattatttttatttcgcatgaccgttcctttattcgcaacatggcgacgcgaattgtcgatctcgatcgcggtaagctggtgacctatccggggaactacgatcagtatctgctggataaagaagaagcgctgcgcgtggaagagttacagaacgcggagtttgatcgcaagctggcgcaggaagaagtgtggatccgtcaggggatcaaagcgcgtcgcacccgtaacgaagggcgcgtgcgggcgttgaaagccatgcgccgcgagcgcggtgagcgccgtgaagtgatgggcagcgcgaagatgcaggtggaagaggccgcgcgttcgggcaagattgtgttcgaaatggagaacgtcaactaccaggttgatggcaaggtgctggttaaagacttcaccgctcaaatccagcgcggcgacaaaattgcgctgattggcccgaacggctgcggcaaaactacgctgctgaagctgatgctcggtcagctgcaggcggatagtggacgtattcatgtgggtaccaagctggaagtggcttacttcgaccagcaccgcgcggaacttgatccggataaaacggtgatggacaacctcgcggaaggtaaacaggaagtgatggtgaacggcaagccgcgccacgtcctgggctatctgcaggactttatgttccatccgaaacgcgcgatgacgccggtgcgggcactgtcgggcggggagcgtaaccgcctgctgctggcgcgcctgttcctcaagcccagcaacctgttgatactcgatgaaccgacaaacgatctggatgtcgaaaccctggagctgctggaagagcttgtcgacggttatcagggaaccgtgatgctggttagccacgaccgtcagtttgtggataacacggtaacggagtgttggatcttcgaaggcgcggggcaaattggccaatacgtgggcggctatcatgacgcacgcggtcagcaggcgcagtatctggcgaaaaaacagccggtttctaaaaagacagttgaagttgctcaaccgaaagcagaaagtgtcaaacgcgctgccagcaaactaagctataacctgcagcgcgagctggaacagctgccgcaaaaactggaagaactggaagcccagctgcagaatttgcaggagcaggttgccgacccttctttctttggtcagtcgcatgaccatacgcagcaggtgctcgcacagctgagtgaagcggagcaggcgctggaaaccgccttcgaacgctgggaatatctcgaaggtttaaaaaacggcgcataagctgaggagttttcatgtgcgatcatcatcatgctgcgcggcatatcctgtgtcgacaatgtgatctgctggtggctttgccgcagctggagcatcgccagaaagctacgtgtccgcgttgcggaacgacattgacaacgtcatgggacgcgccccggcagcgtcccacagcctacgcgctggtcgcgttgttcatgctgctgctggccaatctgttccccttcatctatatgaaggttggggggatcagcagtgaaatcgagctgctggaaattccgaacgtgctgtttagcgaggattacgccagcctcggtaccttctttttacttttcgtccagctggtgccggctttctgcctggtcaccatactgctgctggtcaatcgggtgagcatgccttccgggctaaaggcgtttctggcgcggatcctgtttcaccttaaaacctgggggatggcggaaatctttctcgccggggtgctggtcagcttcgttaagctgatggcctacggcgatatcggcatcggcctgagcttcgttccctggtgtatgttctgcctgttacagctgaggacgttccagtgcgtggatcgccgctggttatgggatgatattgcaccaatgccggcgattacacagccgctgaaagtcggcgtctccggcctgcgtcaggggctacgctcgtgctcatgctgcacggcggttttgcccgtcgatgaggccgtttgtccgcgctgtcggacaaggggaaccgcccggcgtaaaaacagcctgcagtggacgctggcgctgttggtgacttcgctgatcctctatatgcccgccaatattctgccgatcatgattaccgacctgctgggcgataaaatgccttccacgattatggcgggggtgatcctgctatggagcgaaggatcgtatccggtggcgatggtgatctttattgccagtattatggtgccgacgttaaaaatgatcgccattggctggctatgctggaacgccagcggcaagggagcgcgcgactcggagcgcatgcatctgatttatgaagtcgtcgagtttgttggccgctggtcaatgattgatgtgtttgttatcgcagtcctctccgctctggtacgcatcggtggattaatgaatatctatccggcgataggagcagtgatgtttgcgctggtcgtagtaatgacaatgttttcggccatgacctttgacccgcgtttattgtgggatcgtgagccagattcaagccatgaggaaagactgcagcatggaaaataagagcggagaagcgaaagtgcaaaaggtgaagaactggtcaccggtgtggatcttcccgatagtcacggcgctgattggcgcatggattctcttttatcactatagccaccaggggccggaagtgaccctgataaccactaacgcagaaggtattgaagggggcaaaacccggataaaaagtcgcagcgttgacgtcggcgtgattgaaagcgcgacgctcacggacgacctgacccacgtggagattaaagcgcggctgaattcaggtatggaaaaactgctgcaccaggattcggttttttgggtggttaaaccgcaggtcggccgtgaaggaattagcggtctgggaacgctgttatccggcgcctatatcgaactgcagccgggtagcaaaggctctgttcctgcgcagtatccgctgctggattcaccgccgctggcctcccctgatgctaaaggtattcgcatcctgctggaaagcagcaaagcggggcagctttcacccggcgatccggtgcttttccgcggctaccgcgtaggttcagttgaaaccagcaccttcgatgcgcaaaaacgcaatattacctatcagctgtttattagcgcgcctaacgatcggctggtcaccaataacgtgcgcttctggaaagatagcggtattgcggtggatctgactgctgcgggtatgcgcgttgagatgggatcgctgtcgacgctgtttggcggcggcgtcagctttgatattcccgaagggctaccgttaggtgagccggtggcgaataaaacagaatatcatctgtttgacgatcaacgcagcatccaggattcggtgtttacccagcatattgactacgtgatgttctttaaagattcgattcgcggtttgcagcccggcgcgccggttgaattccgcggtatccgtctggggaccgtcggcaaggtgccgttctttattccaggcctgaagcagaacatcaacgacgattaccgtatcccggtagaagtgcgaattgagccggaacgtctgatcaatcagttaggcgccgatcctgacattcgtaagcatatcgatgatctaatgaatcgcgggctgcgcggttcgcttaaaaccggaaacctggtgaccggtgcgctgtatatcgatctcgacttctacccgaaagcccctccgcgcggcaagatgcaggagtttggcggttatccgattattccaaccgtgagcggtggtctggcgcagatccagcagcgcctgatggacgcgctggataaaattaacaatctgccaattaacccgctgctggagcaggcaaccagtacgctggcgcaaagtgaaaaaacgatgcagcacgtgcaggcgacgctggacagtctgaacaagataacgtcaagtcagtcgatgcagcagctaccgggcgatatgcagaatacgttgcgcgagcttaatcgtagtatgcagggcttccagccgggatctgcggcatacaataagatggttgcggatatgcagcgtctcgatcaggttcttcgtgaactgcagccggtactgaaaacgctcaatgataagagcaatgcgctggtatttgaggcgaaggataaaaaagatccgcagccgaagggagcgaaataatgaagaaatggctaatagcggcggcggtatgcgcgctgacggcatgcagcagcggcggtgagagtaaaacttactatcagcttcccgtggcgcagggtggcgcgcaaagcgccacccaccaaagcaaaaacttgctttgggtcgagcaggtgagcattccggattatcttgccggtaacggggtggtctatcagaccaccgatgttcagtatgtgattgcgaataacaatctgtgggcgagcccgctcgatcaacagctgaaaacgacgctggtggcgaaccttagcaaccagcttccgggttgggtggttgcctctcaaccgctgggtagcgagcaggatacgctgaacgtgtccgtcagcggttttcatggccgttacgatggccgggtcatcgtcagcggcgagtggctgctgaagcatcaggggcagttgattaagcggccgttccatattgagcttaagcaacaagaggatggctacgacgcgatggtgaaaacgctcgctcaggcctggacccaggaagcgacggcgattgccagcgagattaaccgcttgccataagtaaaattaataagaataaaagccgctgcaacagtgaaaatcgcagcggcttttttatttgtctcatcagtttgttacttgtgctggttcacagtttttgtacaaacgaagtttcatgtagctcacaaatatgacaatggcgtgaattttgcgcattgacgctatccctgattcgcggtattcgttaaccgtggtagcgtatttagtgaccattgttttcttttccaccagatcaaagtatgagggaaacgaggcatgaagagacaaaaacgagatcgcctggaacgggcacatcagcgtgggtaccaggccggtattaccggaaggtcgaaggaaatgtgtccttaccagaccttaaaccaaaggtcttattggctaggaggctggcgagaggccatggaggacagggtacaaattgcctgactgtctctttaaaaagaagcctccgctgcgcgggggcttcgccttttctaacgcgtgatgtttatcagaacgcggaagtgtcctggaacaggcccactttcagatcggttgcggtgtaaatcaaacgaccgtcaaccagcacttctccatccgccagccccataatcaaacgacggtttatcacgcgtttgaaatgaatacggtaggtcactttcttcgccgttggcagtatctgaccggtgagcttcacttcgcccacgcctaatgcacgtcctttaccttcgccgcctaaccagcccaggtagaagccaaccagctgccacatggcatccaggcccagacagcccggcatcaccgggtcaccaatgaaatggcaaccgaagaaccacaggtccgggttaatatcgagttctgcctcaacataacctttgtcatagttaccaccggtttcggtcattttgatgacgcggtccatcatcagcatacttggcgccggcagctgtgggcctttggcgccaaagagttcaccacgaccagaggcaagaaggtcttcttttgtataggattcgcgtttatctaccatgttttcagtaagccttattttgagttcgggacgcaggatagctaacacgtgtacgctgaacaagtccgatcagttcgaacctgaaccgcctaaccagcgtagcggccacggaaagcgatgacgactctcttgctgtgtcgcctgcgcaattctttcctgaatagtttgccgtaacgtttgtccttctccgtcccagagtagctgggtcagaatgggcagcgcttccgtcacgtcatcgactgcccagataaagaactgctcatccgcaacggcctgttgcagttcctgcgccaggctcaggtgacgaacgttggcggagggaatgatgactccctgtttaccggtcagcccacgctgctggcaaatagcaaagaagccctcaattttctcgttaagcccgccaaccggctgtacgcgaccaaactgatcgacagaaccggtaatggcgatgctctgattaatcggcacattggccagcgagctgatcagtgcgcacagttcggccatggaggcgctatcgccatccacttcgctgtaggactgctcgaaggtcagagaggcggtgaaggggagctgttgttcgagctccagctcggacatcagaaacgcctgcatgatcatcatgccttttgcatgaatgttgccaccgagctcggccttacgctcaacgtcaataaattcgccgtcgccgatatgtacgacgcagctaatacgtgaaggctcgccaaacgcacgcggatggcccggaaactcaatgacggagagtgcgttgatttgtccgacgcattcgccttcggtctcgatcaggatttgctcctgcagtatttcatcctggatgcgttcagcaaggtagccttcgcgccacaaacgacgctccagcatggtttgcatctcttcagcgctaatctcttcaccttcacagaacgcggcggcttcgcgaagctggcgagcaatccagagcacgcacagcggcaaggtttcctggtcgcctgtataacgcgcaccttcctggatcagcagcggccaggcgttagctgacagccccgggagttcgagcagttgagcattttgccagacccactggcaccactgcttcagcgtatcggcatcagcgatttgcagattatcttcatattcgctgtagatagcctgcgcagaaagctcgggttccatctcctgaaaatcagcaagagattcccgctcgccgaccaggataactttcaaactcaggggcatagagggaatgctgaccggaagagggcgagactcatcgaatgataaccagtcaaaacgctggcgggttaccatatttttcagccgcatccacagcaggggctgtgccagtaatgcacggagggagagaattaataccccgccgttagcgcgatggaccagaccgggttgtaacgtgatttcaccattaaactggcgcacgcagccaaaaagctgctctgcttcgatccagtccgcggcttcaaccggcgcaacgctggcgaaattatcttcagtcgtttgcgcaggggagagcgagatttttccgccatcaacctgatagcgaacgccacagagcgtttgtgccggttggtgtaaagtacgggtttcgttagccagccactgcaggtactccggctcttccggaattttaaccagcataaacggcgaaatggctggagtgaccaggagctgctccaggccatagaagagtcggggttgcagttcgcctgagagggatgcctctgcgtgagctaagtcggcttgtgcaaacagcgcctgataactttccgtatcaggagcgaggtcgtttcgggtaagtttcgtaatggtcaaagtcgctgttttttagtcagatgtaaaacgcgcgattatacattatgcggcgtccgagcacacgagggattgcggttgtcgcggtgataacgaatctaccaacatcacgaaagatcatttattctcagcacatcaggaaaaaactgatatcctgaaatgagttacacggtcacattgagatcgcaatgaaatatcaacaactggaaaatcttgaaagcggctggaaatggacttatctggtaaaaaagcaccgggaaggtgagcttattacccgctacattgaagccagcgcagcgcaagccgccgtcgatttattactgacgctcgaaaatgaacccgtgctggtgaatacctggattgagcagcatatcaatccggcgctggtgaaccgcatgaagcagactatccgcgcccgacgtaagcgtcattttaacgcggagcatcagcatacgcgtaaaaagtctatcgacctggagttcatggtctggcagcgtctggcaggtctggcgcaaagacggggtaaaacgctgtctgaaaccattgtgcagttgattgaggatgctgagcataaagagaagtatgccagcaagatgtccagcctgaagcatgatttgcaggtactgttaggtaaagagtagcgatgcaagcatcgggatatatcggtgcgctgctgctttttgatagcggaatttaaggtaaaaaaaaccccgcatcgcggggttttttattaacgagataacttaagcctgcggctgagttacaacgtctttgtagcctttaacttcgatttctacgcgacggtccggcgccaggcagtcgatcagagctgcgcgagctttcacgttgtcacaggtgttgccagtaaccgggttggattcgcccataccgcgagcagagattttgctagccgggatacctttggataccaggtaatcaacaacggactgagcacgtttctcagacagctgctggttgtaggcatcagaaccgatacggtcggtgtagcccagaacaactgcggaaccgtctttcggatccatgttgctcagctgggtgtacagctgatccagagcctgctggccttctggtttcagagtagatttgttgaagttgaacagaacgtcagacttcagggtgaagtgcttggtagtcacttctggagccggagccggcgccggagctacaaccggagcaacgtcgtcctgaccgaagcggtaggatacgcccaggctcagcatgccgttatcaggacgggtaccaacggtgccagcgtcgccgatgttgttaacccactggtattccagacgggttgcgatgtcacgagtaacagcccactctaagccgcccgcgaataccggggagacgccagtgtcgtgttcgctacgggaaacgccagtagaagcgtagttacctttggagtcagcgcgccaaaccataccacctagacgggtatagatatccagatcgtcagtgatcgggtaacccagtttagcagtcagctgaacgccctgagctttgaaagcgccgttgtcaacgctgcctttgtaagccatacggcccagccagtcgtaacccatttcaaaaccgaggtacgggttaacctggtaaccaccaaacgcaccagcacccagctgatcgttacgggtcgggccgttgttgccctggaaaccgttaccgtagaaaccggtgtcgtgatactgggaccagcccagtttagcacctgcgtaccaggtgttatctttcggagcggcctgcgctacggtagcgaagccagccagtgccactgcaatcgcgatagctgtctttttcattttttgcgcctcattatcatccaaaattcgccatgaaggttcagaagacctcacggttaaatccttcacccggggcgtgacttgttgttaactatgctgatacatgcagcgtaagccgatcacccctggcgatgtaaagtctacaacttagttcgaaacttacaagtgtgaactccgtcaggcatatgaaaaaaaagggttgtgtacgctatgtttaacaaatacggttgaacttaatcgaggcaaaaaaagtcgcgaagccgcatcagacaagcattttaacaaaaatgccgttccagaaagcccatttcacgccagggcaaaaaaaattccaggattaatcctaaactcggttaatgatacaggtttgagtgaatttttagcccagaaagttgtctgccaggctgagcggtatttcttaccgggcgcatgataaagcccatcgcgtgaccctcttctgcagcggcaaccaggcgttcatgttcctcaatgctcagttcttctgatagccagccaataacgacgctataatttccggtgcgcagtgagcgaaccatggattccagggtgttagcgggggagagctggctgatctgcatcaccttcgacagcggcaaaccggacgactgcacccattcgcggctcagcttctgttgtggcgtcagccagagctgccagcgcgattgctggccaagctgttgtaataaaggaagcaatagcagctgcgtcatcatgggctggtcttctcgatagactatttcactgatcagcccattagctggctgttcggcagcgtcatgagagagacgacgtactgaagtagaagtcagtggtgaacgatttgcgtgagctgatgtaaacatagtctatcccgcctgtgggttactgtatgcatatacagtatatgcggccgggtgaaagatcaaccctattttctctgttgctggatgaaatttgtacgtcaccgggagtgaacccgaaccggtcgcatcggatgtccgcgcgtacacaatgtgaattcatggttgtcgcgctttcttgctggctaaattcttctcataaatgatggcattaacgctctatgagcgaacagggatgccctgctctctgtatgctactgtgatgaatattaattaagcattttatctttcccggatttaacttcatcaaaagactattttctgaaagcggctcgcaaaaaaacacgccgattaaaatgaatagataattcatgttgccgcatgaagggaagtcacttattttctcttttaacggatccgttagcacatttatgtcttatttacatgattaacaaaggaataatcatgaagaaagttatatgtcttaggatccatcagtttcgggcatgtttgtctccattaggaaaaataagctgtcggcccttatttggtggctatagcctggcgatagataataccgtgtttgccatgatggctgagggggaaatctatcttcgggtttgcgagcagagcgcggagtaccgcgtggcgcataaaaacccgctgttgaagatgcagaagaatggtcgtctggtcgcgctgaagtattatcatatagatgaggaactttggcgcgatagcaaaatgctttttcatttatcggcgctgtcattacagagcgcgcgtcatgaaaaacatcggcagcgacattccggaagattaaaaaatttgccaaatatcagttttcatatggagctacagttgattaattcaggcattacggatgaattaatgctgcgtaagattggggccaaagaagcctggttgaggttacgaaaaataaataaagcgctaacggtgaatattctttattccttacagggggctattgaaggcgtccatgcggccacgctcccgacgcagcagcgtcaggagcttgagacgtgggcaacggaacaaatgcgggagagtgagagctattcgggttgaatctcaacctgttgctgtagccggcaaatctctggcagcagcgccagtagcagcccgatttgttgaagcactaacggctctttgctatcggcacgagggtcaagatgctgtatccgggtttgcaggcttgttaacgcttgctgtacccgctgttcatcggccggtgagtggtgcagcgcgtcatcaacataacaaacggcatcgtccagcagcgccaggatatctggcgttgtcagcttttccctgtgcgcgcccagggcggagatatagctggtaaaagtgtggttcaggcataacaaccgaaaagcggtttcccgcatttgcgagcccgctctgggttccgttgataagtttgatacaacggatgccagctcaccgtccctgctgtgcgccgctcttcgcgcaatacgataggcaagacggttgtcgcgcccctgatgatattgctcgagtatggcatctaaatatcggcagttggcattgattgcttgttcaagtactcggggcaggttgcggaacttccagtctggccaaataaagctgactgcggcccaggcgatagcgcagccgatcagcgtatcaaatatacgcggtagggcgacttcgaaaccttcccccaggaggttaaagcacagcaaaaccaggagggtaatgaacatggtcgcatgggcgtactgcacattacggaatgcgaagaacagcacgccggtcaggacaattaaaagcagctggccttcgacggaagggacgagaagcagtaccggcaggccaatcgctacgccgatgagcgtaccgattatccttagcgccagccggtgacgagtggcgttatagtttggctggcatacgaacaggctggtcagcaatatccagtaaccgtggtttagtccggttaactggataaatgcataacctgcgcacaggactaatgacattcggaccgcatggcgaaacagagctgactctggggtcatattattgcgcaggcgcagccagatatcgctgaaactgccaggttgatcgtcggctaacaggttttccgtattgtgactggactgtacagtcgtctggacggattcaattgtcgccagctgggcgtcaatggcgcgtaagttattaagcaaaaatcccaacgccttaatctgttctgccggcgcgccgctggcttttacgcgatcgagcgcggcgtcaagatgcataaaagcgcgctcaaagtgagtatcatgaaggtagggttcgcgtagcaggatagaacgagacagtttctggcaggcctgcgcctgcattgacagcatacgctggaagcggaacatcacgtcactgtagcgaaaatgatcgcgcagcgtttggtattgaatatgcgatgagcttgcgcgttcgtggatgtcctgcgccacgaagtaatattgcaaggtgcgacgcgttccgcgctgcccgcgatcgccgcgcaggcgagtcagcagggaaactttggtctgattcagcgtggccacaagctggccattggctatcgccaggtcatacagcggagcctggctttcatcttcaatatccggatcgaacaggcgcgatttaagctccagatagcgagctaactgctcgtagctgcgtgccagattgtcctgaagagggcggatagggaaaatcagatgtccggagagggtaagtaagttgtaccacaccgcgccagccagcaaaaacagcggctgaagataccagtggctgtaaagcgtaacgcccagcatggtatagatggcgattaacaaagcaccaaaggcgatggtggcatagcgttggcccaggccgccgagcaaaataaaaccgattgttgaaacggttaatcccgccgcaaataaccacggccagggaaaaaggagttccactgaggctgaagcaataaaaaagcacacgagggtaatggccagattacgcagacgtcctgtcaggcggtcatcaaggtcggtcagcgccgctgccaccaccccgagtgttagaggaatcgtgagttttacttcgccaagccaccagggaaatgcggtcgtgccgcagagtgcgataaatatcctgatgttatataaccaggcactgttccatgtatagcggcgtagcaggggggtgagcatttctctattccattcaattactgaaagcggcgacgcgcattggcttcacgcgcggcgcgagcggtctcgacggagacgactcgtcggcctactggccataaagcaatagcggcgattttaaaattggcgatgccaaccgggatgccaatgatagtcaggcattgggcgataccacaaaagatatgcatcagacacagccaccagccaaagaaaataaaccataaaatattcaatagtgtcccacccgcgtttagcaggctattctttccctgaggatcgagttcgtcgacatgaacggcctcattcccatagggaaaaagagagagttttgttatctcccagcaggagcgggtgagaggcagggtaaagatcagcacaatgctgaccagcgtcgccagaagccagccgagcgtggtggcgaatccgccaaggataaagtttaaaatattcagaacggtacgcataaaccctctgcttaatacggtggataataaggcacggccattgtagcgttttttacgctggagcacccggtcgctggcggttaaacttaaaaacatccaaactgattgaaattcgacattatatggaacttagagcgacaacattgggcaagcgtatggctcagcatccttatgacagggtgcaacttcttaatgccggagtaaaggtttccggtgatagccatgaatatcttatacctttcaatcagttattatcaattcattgcaagcgtgggctggtttggggggagctggagtttaccctaccgggcgagaaagttgtgcgtttgcatggtaccgaatggagtgaaacccagcgtttttaccatcatctgaacacgctctggcagcagtggagcgcggaaatgagcgatatcgccgctgatgtacttcgccagcagctggcggaagtggcgcgttccagcgcggaaggtaaatggttgacgcgtcagcaggtaagcgatattcagcgcaaaatacgccatgcgctgagcggattacctgtgccgacagtccgtctcgatgcttttgataactgccgcgagctatggcggcaatgccagggttggttgagtaatacggaaaaagccaggctcgagcataaccaaacttttacggaatccatgctggagcaataccgcggattttttgccgcagtggaatcatcgccgttgaatccggctcaggcacgcgcagtcgtaaacggcgagcgttcgttattagttctggcaggtgccggaagcggtaaaacttccgtgttagtggcgcgcgcaggctggttattgacccgtggcgaagcggcggctgagcaaattctgctactggcgtttggtcggcaagccgcgcaggagatggatgagcgcatccgcgagcgcctgggcactgaagagatctcggcgcgtacttttcactcccttgccctgcacattatccagcagggcagtaaaaaagccccgacgatcagcaagctggagagcgacagcgctgcacggcaaaaacttttagtacagagctggcagcagcagtgccaggagaaaaaagcgcaggcgaaaggctggcgattgtggctggaggaggaaatgggctggcagatccctgaaggggatttctggcaggacaaaaagctgcagcgtcgtgttgccagccgccttgaccgctgggttagcttgatgcgtatgcatggcggatcgcaggctgagatgattgccggggcccctgaagaggtacgcgacctttttggcaagcgcgttaagctgatggcccctctgctaaaagcgtggaaaacggcgttaaaagatgaaaacgccgtcgatttctccggcctgattcatcaggcgatcaatattctggataaagggcggttcgtcagcccgtggaagcatattctggtggatgagtttcaggatatctccccgcagcgggcatccctactcgccgcgttacgtcggcaaaacacgcagacgacgctgtttgccgttggcgatgactggcaggctatctaccgtttcagcggtgctcagctctctttaacaacggcctttaatcactattttggcgaaggggattgctgtgcgctggatacgacgtaccgatttaatagccggataggcgagatcgcaaacgggtttatccagcaaaatccgcaccagttaacgaaaccactaaacagcctggtcgcaggggacaaaaaagcggtgacgttattggcggaggacaaactcgacgatctgcttgataaaatgagcggctatgtcaaacgagagcagcggattttattgctggcgcgctatcatcatttgaagccggcggcgctggagaaagccgccacgcgctggccacatctgcagctcgattttatgactattcatgccagcaaaggacaacaagctgattacgtcataattcttggccttcaggagggggatgatgcgtttcctgcaccggcgcgtgagtcgattatggagcaggcgctcttaccgcagccggaggattttcccgatgccgaagagaggcgtttgctgtatgtcgccatcacccgcgcccgcctgcgcgtatggctgttgtttaataaagagcaaccttcgccgtttgttgaaatgctagaggcgctggatgtcccggtagcaagaaagccatgatggctggcggcgtggccgccagcggggcttatttcagacgctctgcaaggtagcgctgataatcagggatcaggatatcaacggggtcgctgaagtgcggggactggataataaagtcggcggttgagacattggtggcgacgggaatattccataccgtcgccaaacgtaataacgctttaacatccgggtcgtgcggcacggcatttagcggatcccagaaaaaaatcaatacatcgattttaccttctgaaatcagcgcacccacctgctggtcgccgcccatgggaccactcagcatcgcatgcacctccagcccggttgcgcgtgacaccagatttccggtcgttcctgtcgccgagagcgtgtgttgcgccagcaatggctggtggcgctcgacccacttcatcagcatatctttacagtgatcgtgagcaaccagcgcaatatgcttgcgtgctggcaaggtacgtgttgttagttccatcatttcattccacattttggcctgtagacagattactggaagtcactgttgctgcaagcgtcgggatgaaaaaatttgacgcatctgcaggtcaggactcatgcgggttcatccggattagcatacacttgggctaaatagcaggaggatgatgatgaaagaaaacgatatcgcaggtattttgacctcgacacggactatcgccctggtgggggcaagtgacaaacctgaccgcccaagctatcgggtgatgaagtatcttctggagcaggggtatcacgtcattcccgtttcccctaaggttgcgggtaccacgctgctggggcaaaaagggtatgccacgcttgctgacgtgccggaaaaagtggatatggtcgatgttttccgtaactcagaagcggcctggggcgtcgcccaggaggcagtggctatcggtgcgaaaacgctatggctacagttgggggtaatcaatgaacaggcggctgttctcgcccgagacgccggtctaaacgtggtgatggatcgctgtccggcgatagagatcccgcgattaggattagcccgttaaacttaaaaccccgcctggcggggttttttattgtcatccctaaaccacctcctagggaggtggtgattgctcctgtaaggctatagcctgaagaatgcccatgtcggaatatctctgcttactcaccacaagtaaaaggagacaaaccgacatgggactttacaggagttcatcacatgtatattggcgttgcaaataccacatagtctggacacccaagtaccgattcaggatcctgaaagataagctgggtaaggagctgtacaggacgatctatatcctctgtggaataaaggattgtgaggttctggagctaaatgttcagcccgatcatgtacatctggtcgtcatcattccaccaaagatctcgatatcaactctgatgggccatctaaaaggacgcagtgccatcaggctttataaccgttttccacatatcaggaagaagctatgggggaatcatttttggtcgcgaggctactttgtcgatacggtgggagtgaatgaagaaattatcagacgatatgtgaggcatcaggagaaaacggaacaaacgtatgaacagcagatggaattgctggagtaatcagcggaaggtgacaatagccccccttacagggggcattctcaaaagccaccttctcagaaggtggtcttttactatcaatattgattaagttatttatggtcaatattttaattaaaactacatcgaaacgtttctttattttaaaataaaacccattgtctttgtggatttaacagacattgtccaggttttatctcccttattacttaaaatttcctcgcgaggataatttattttttataaataaaccatagaaaatacatggggaatccttataaaatattttaaagtttaaaaaaataattgttttttctcatgtcatttatatgactaatatcacagatatttttcgggtagcgttaaaatggaggtttggtgatataagaaatgtattatccatgattttatcttcattgtaataaccgtgagcaatcatttttcttatggtctctattaacatctcaaaatgtaagtttattattttaagttattgtaatttgagtaatttaatttattacagaatgtgatttgattattttgctttcaccttgcgggactccgttaagtggtatatctaataagatgcataattaagaattatctcatacctctgactgcgtcttcatctcaagggtgcaacctgatgaaaaatataaatgtgacagtgaaagaaactggtgctgaatacaccgtcgatggcaatcaagttaatctcaatacgcagtcagtggttctcctgcacgtcaagcgtgaggatattcgttcatatacccgacaaggtaatgatcttgttctaaaactccaaaacggtgacaccgttacaattaaaaactttttcgttgtggatgagcatggacagcacagtgatttagttcttatggatgatgagaccggcgcgctatggtggctagaaggtgcgggtactgatggggcacactattcgctgattagcgatctttcagaagtcatcgcgaccggtggcgcgggacaaagtattgccggttgggtcatggctggcgcggctttgctgggtattgcggcaatgttcgccggcacctcaaacaaagaccaccactcttcggtttctgaaagcgattctgatgctgacagtgattcagactccgacagtgatacggatgctgacagcgatagcgactctgattcagacagtgattctgattcagatagtgattccgattctgacagtgattccgactcggattcagattcagatagtgattcggatgctgacagcgacgcggatagtgattctgatgctgacagtgactccgatactgataccgagctacctaccgcggcacagaacatagcggtcattgacaatgcgggccccatcaccggtgtgctccattctggagatgtcactgacgatacgaccccggagattaaagggacagcagaggctggggccacgataacgatttatgacggcgataccaaactgggttctgtcgtcgcggatgaaaatggcaactggagcttcacgttaccggagctgagcgagggttcccatagcctgagcgcgacggtgacggacaaagccggcaacgtcagcgagcgttcgccggcgtttgaactgaccatcgataccactgcgccggcagccagcattccgcaggtaaccgacaatgttgcagagcacaccggccaactgcagagcggggatctgaccaacgatgcgacgcccaccctgaacggcacggcggaagcgggatccacggtgacgatctatgacggcgacaccgtgctgggcacagtggttgccggcgaggatggacgctggagcttcacgccagctagtctggaggaaggcgcccacagcctgagcactacggtaacggacaaagccgggaacgtgagcgaacgttcgccggcctttgaactgacggtagacactatagtgaacccggttagcgatctgcaggtcactgataatgcaggagaagacacgggtacactgaacagcggtagcgtgacggatgatgatacaccaaccttgagcggtacggcggaagcaggtgccacgatcacaatttatgacggtgataccgtactgggcaccgcgattgcggacgaggacggacgctggagctttactactgacgcactggctgaaggatcccatagcctgagcaccacggtgaccgatctggccggcaacgtcagcgaacgatccccgatatttatattaactgtcgatcttagcgatgataccgactccgacagcgactcggattcagacagtgactccgactcggacagcgatgctgactctgacagtgattccgattctgacagcgactcggattcggacagtgattcggattcggacagtgattcggattcggacagtgactccgactcggattctgacagcgattcggactcggacagcgattctgatagtgacagcgattcggactctgacagcgactcggattctgacagcgactccgactcggacagcgattctgatagtgacagcgattcggactccgacagcgactcggactctgacagtgattcggattcggacagcgactctgactcggactctgactccgacagcgattcggactccgacagtgactcggattctgacagtgattccgactccgacagcgattcggattcggacagcgattctgactctgacagtgactccgactcggacagcgatgctgactctgacagcgactcggattctgacagcgactcggattctgacagcgactcggattccgacagtgactccgactcggacagtgattccgactccgacagcgattcggactctgacagcgattcggattcagacagcgattctgactctgacagtgactccgactcggacagcgatgctgactctgacagcgactcggattctgacagcgactcggattctgacagtgactcggattctgatagtgattccgactctgacagcgactcggattcagacagcgattctgacgctgacagtgactcggattcggacagcgattcggactccgacagtgactccgactctgacagtgattcggactccgatagtgactccgactcggattccgatagtgactccgattccgacagcgactccgattcagacagtgattcggattctgacagcgactcggactctgacagtgattctgactcggactccgacagtgattcggactccgatagtgactcggactccgacagtgattctgactcggacagcgattctgactcggactccgacagtgattcggactctgacagcgatgccgattcagacagcgactcggattcagacagcgactcggactctgacagtgattcggatagtgacagcgattctgattctgacagtgattccgatacggacagcgactcggactccgacagtgattctgactcggactccgacagtgattcggactccgatagtgactcggactccgacagtgattctgactcggacagcgattctgactcggactccgacagtgactcggactccgacagtgactcggattctgacagcgactcggattcggacagcgattcggactccgacagcgattccgattcagacagtgattccgactccgacagcgattctgatagtgacagtgattccgactcggacagcgactctgactctgacagtgactcggattcggacagtgattcggatagcgacagcgattcggattccgacagtgattcggattcagacagcgactcggattcagacagcgattctgactctgacagtgattcggattctgacagcgattcggactctgacagcgactccgattcggactctgacagcgactcggattcagatagtgactccgactctgacagcgattcggactcggacagcgactctgactctgacagcgattctgactcggacagcgactcggactccgacagcgattccgactctgacagcgattcggactctgacagcgactccgattcagacagtgattcggattcagacagcgactcggattcggacagtgattctgattcagacagcgattccgacgctgacagtgattcggattcagacagcgattctgattctgacagtgactccgactcggacagcgatgctgactctgacagcgactcggattcggacagcgattcggactcggatagcgattcggactcggatagcgattcagactctgacagcgattcggactctgacagcgactctgactctgacagtgactccgactctgacagcgactcggattccgacagtgactccgactccgacagtgactccgactcggattccgacagtgattccgattccgacagcgatgctgactctgacagcgactccgattcagacagtgattcggattcagacagcgactcggattcggacagcgactccgactctgacagcgattccgattccgacagtgattcggattcagacagtgattcggattcagacagcgactcggactctgacagcgactccgactctgacagcgattcggactctgacagcgactccgattcagacagtgactccgactctgacagcgactcggactccgacagtgactccgattccgacagcgattccgactccgacagcgatgctgactctgacagcgactcggattcagacagcgattctgactctgacagtgattcggacagcgactcggattcggacagcgattcggattcggacagtgactccgactccgacagcgattcggattctgacagcgactccgactctgacagcgattcggattccgacagcgattcggactccgactctgacagcgactcggactccgacagcgactcggattcagatagtgactccgactcggattcagacagcgattccgattcagacagtgactcggattccgacagcgactcggattcagacagcgactcggactctgacagcgactcggattcagacagcgactcggactctgacagcgactctgactccgacagtgactcggattctgatagtgacagtgattccgactctgacagcgactcggactccgacagcgattcggactccgactctgatagtgattcggattccgacagcgatgccgattcagacagcgattcggattccgacagtgattccgactctgacagcgattcggactctgactctgacagcgactccgactccgacagcgattcggattctgacagtgactcggattcggacagcgactccgactccgacagcgattcggattccgacagcgatgccgattcagacagcgattcggattccgacagcgattcggattccgacagcgactcggactcggacagtgactcggatagtgacagcgactcggattcagatagtgactccgactccgactcggattccgacagcgattcggactcggacagtgactcggattctgacagtgactcggattctgacagtgactcggattctgacagtgactcggattctgacagtgactcggattctgatagtgattccgactctgacagcgattcggactctgacagcgactcggactctgacagtgactcggattctgacagtgactcggattcggacagcgattcggactccgacagcgactccgattcggactctgacagcgactcggattccgacagcgattcggactctgacagcgattcggattctgacagtgattcagattccgacagcgattcggactctgacagcgactccgactccgacagcgactcggattccgacagcgatgccgattcagacagcgactcggattcggacagcgattcggactccgacagtgattcggactccgatagcgattccgactccgacagcgactcggattcagacagcgattctgactctgacagcgactcggattcagacagcgattcggactctgacagcgatgccgattcagacagcgattcggattctgacagtgattcagattccgacagcgattcggattcggacagcgactcggactccgacagtgattccgactctgacagcgactctgactccgacagcgactctgactccgacagcgactcggactcggacagtgactcggatagtgacagcgactcggattcagatagtgactccgactcggattctgacagtgactcggactctgacagcgattctgatagtgacagtgattccgactccgacagtgattcggattcggacagcgactctgactctgacagcgattcggactctgacagcgattcggactccgacagcgattccgattctgacagcgactcggactccgacagtgattctgactcggacagcgattctgactcggactccgacagtgactcggattctgacagcgattcggattccgacagcgattcggatagtgacagcgactctgattcggacagcgattcggattccgacagcgatgccgattcggactccgacagtgactccgattctgacagcgactcggattcagacagcgattcggactctgacagcgactcggactctgacagcgactctgactccgacagtgactccgattcggacagcgactccgattcggacagcgactccgactctgacagtgactccgactcggacagcgactcggattccgacagtgattccgattccgacagcgatgctgactctgacagcgactccgattcagacagcgattcggactctgacagcgactccgattcagacagtgattcggattcagacagcgactcggattcggacagcgactccgactccgacagtgattccgactccgacagcgatgctgactctgacagcgactccgattcagacagcgattctgattctgacagtgactccgactcggacagcgatgctgactctgacagcgactcggattcggacagtgattcggactcggatagcgattctgattcagacagcgattctgactctgacagtgactcggattcagacagcgattcggattccgacagcgatgccgattcagacagcgactccgactccgacagtgactccgattccgacagcgactcggactcggacagtgactcggacagtgactcggattcagatagtgactccgactccgactcggattcagacagcgattcggactctgacagcgactctgactctgacagtgactccgactctgacagcgactcggattccgacagcgactcggattcagacagcgattcggactctgacagcgactctgacagcgattcggattctgacagtgactccgattccgacagcgattctgattctgacagtgactccgattctgacagcgactcggattctgacagcgactcggattctgacagtgactcggattctgatagtgattccgactctgacagcgactcggactctgacagcgactctgactccgacagtgattcggattcggacagcgattcggactcggatagcgattcggactccgacagcgactcggattccgacagtgattccgactctgacagcgactctgactccgacagcgattcggactctgacagcgattccgactccgatagtgattccgattctgacagcgactccgactcggacagcgattcggactctgacagtgattcggattcagacagcgatgccgactctgatagcgactcggatatcccgcaggccaatgcggatactaataccgcgctgatctctgagaaccatgacaatctcgacggggtaaacggtacgattacccagctgacaggcgtgaacctgcttggcgtggtcgatgtttcgctgcttagcggtaataactttgactttactgtcgcgagtggaacgactcaggatgtggcactggatatttccggcggcaccacgctgagctcggcggcgctgattaatacgctactgctgctgctgggtggaacgaataccttccaggccgatctcgcggtggtgaatacggtgaccggagaagtggttgcgctggcgtcgaatgcggtgactattacggcgggaggcgtcagcctggattacagcggtagcgccagcttcagcgacctgccggaggggaactatacggtagtgatttcgtcgccaacgaataccgggctgctgccgacgctggtgaatttcctggcgaatctcagcgtagcgaccgcggtggatgtggcggtaaccgactccgtaggatacgagtccgcgattatcagcggtaacgtactgcagacggacgcgggtggggacgtcggcgataccggtacggatattactgtgaccagcatcgttgcgacctcggttccgggggcaacggcggaaccggttagctcgggggggacgatcgttgagggcgcctacggtacgctggtgatctatgccgatggttcttacacctatcacgcgaccggagacgctgactctgtcggtcaaacggaggtctttacctacaccattacggatgcggatggcgatacggcaacgacgacgctgaccattaatattggcctggccgatgatacggatagcgatgctgattccgactccgacagtgattccgactctgacagcgattcggactccgacagcgactcggattcggacagcgattctgacgctgacagtgattcggattctgacagcgattcggattcagacagcgactccgactcggattccgacagcgattcggactctgacagtgactcggattctgatagtgattccgattccgacagcgattcggactctgacagcgactctgactctgacagcgactctgactccgacagtgactcggattcagacagcgattcggactctgacagcgactccgattctgacagcgactcggactcggactcggatagtgactcggattcggacagcgattcggactccgacagtgactccgactctgacagcgactcggattcggacagcgactcagactccgacagcgactcggattctgacagtgactcggattctgacagtgactcggattctgacagcgactcggactccgacagcgactcggattccgactgcgactcggattccgactgcgactcggactctgactgcgactcggactctgacagtgactcagactccgacagcgactcggattctgacagtgactcggattctgacagcgactcggactccgacagcgactcggactctgacagcgactcggattctgacagcgactcggactctgacagcgactcggactccgactgcgactcggactctgacagcgactcggactctgacagtgactcggattcggacagcgactcggattcggacagcgattcggattcggacagcgattcggactccgactctgacagcgactcggattcggacagcgactcggattccgacagcgactcggattccgacagcgattcggactccgactctgacagcgactcggattcggacagcgactcggattccgacagcgatatcgaggccatccccgatagcaacagcccggacgttgtcgcgctggaaggtaacctgaacaacgtcagcggtaccagcggtcaactggttggcctgacgttactcagcaccgtcgatgtctcgctgctgtcgggcaataatctgcgctttagcgtgggttccggaaccgttgaggatatgacggtatcggtgaacggcaactcgctgctgacggcgagcggattgctgaccactatcgtcaacctgctgggagcaggaaataccctgacggccgatctgtcggtggtgaatacggtcaccggcgaagtcgtggcgattgcggaaaacagcgtctctatctcggcgagcctgcttggcgggctctcctataacggtacggtctccttcgccaatctgccggcgggcgactacaccatggttatctctgcgccggaaagtaacggccccctggtatcgttgatcaacgcgctggcggcggcccaggtggcaagcttcgtcaacgtggacgtgacggattcggttggctacagcgtcggcgccattgaaggtaacgtgctggataccaccgccagcggcgatatgcaggatagcggtcagggcatctcggtcaccagcgcggtatcggactccgtcgacggatcgaccccggttaacgtgaccagcgctggcgtcaatatcaccggggcttatggggtactgacgattcactctgatggcagctatagctaccagttgaccaaaggcggggccgctatcggtcaatcggatgtctttagctataccattaccgatgaagcgggcaatacctcgacgactaacctgacgattaatatcggcggcaacatcgaaccggcgcaggccaatccggatgctcaggaaacggatctgaccgcgacgttcgatacgctcaacggtgaaagcggtaccgttggccaacttgtcggcgtctcgttactcggttccgtcaacgttggcttactcaacggcaatagttttgactttgacgtcgccacgggggcaaacgaaaaagtgctgctcgctgtctctgggaccaccggcctgagcctgggcgcggccctgagcacattgctgagcctgctgggtggcgcatcgtcctttacggcggatctctctatcgtcgataaggcgaccggcgaagtggtgcaggttctgaccaacgccgtcaacattaatgttaatggactcggtctcagcctgggctatagcggcggcggctggtcctcaatgttaccttcagggtcgtacacagcggtggtctcttcaccgaataccggcggtctgttgggcgcgctgctggacctgaacctgggcacctttgtcaacgtgtcggtcaccgactctgagggctatcacaccgacagcctgacggggaacgtcctgcaaagcgatggcgacggcgatgtggcggacaccggggtaaatattaaggtgacgagcgtcaccgccacctcggtgaccgacgccgatccggtatcggtcactagcagcggaacgacgatagccggtgcctggggatcgctgaccatccatagcgacggtagctatacctatcagccgtacggcggagtgaatagtgtcggccaatcggaggtctttacctacaccataaccgacagtctgggccacacggcgagcacgacgctgacgatcgatatcgacagcccggcttcgctggcggtgaatgatgtcgttgcgctgaacgtggcaacggcgctggcaacggtgaatgttccggcgattgacaccgcggggctgaacacaagcggtaagtcgacaacgggcggagtatcagcgagtaagtcgattaactttagcgtgggggccgatcgcgaaatggataccctctcggtgaatgtgaactacaccgcgagtggatcggtggtcaataccgtcaggattgacagcacggtcagcatttatcacgtactcagcgacggcagtaaggttctggtgtggcagggggcaccgacagaaaatctgaccacgattatcggcgcaacagccagcgctacggatacgctaacgctaacgggtgtggcattgagcgaaggaaattacgagatggtcctggcttcgaaagccaccgccactctggattctttcttaacgccagcgccgaattatacggttggagcttctatcaccggtacgacgttcgataccgcaacgcactatacggtggcaggaaccaacgtcagcgggaatatccagaacggaaacaactcgggcggtacggaagatttccatggcgtgctgtatgcctcatacaccgtcgccggacatacttccactggcagtgccgaatcctggaccttcaacagcaatggcagtatcaccaccagcaacggtagcgcagtaaccggaagtagcgtcacaatttacggtgactatggcaccctgacgatggcgaataatggttcttataccttcagtctgaaggcagggatggatgtgtcgacaatcacgcacaaggaggtcttcgcctacacggtaaacgacagcaatggcgtttcttccgcggcgacgctgaccatcgatctgcatccgcagattaccggcagcgtgaacggcgacgatatccacagcaccgcttatgacgataccttcaccctgggtatcggggccgacacggtggtttacaacctgctggccgatgacaataccggcggcaacggcagcgatacctggaaggatttctcggttgcgcaaggggatcatatcgatgtgtcggcgctgctggttgactgggatgggaacagcagcagtctgggcaactatgtgaccctgagctacgttggcaataacacggtggtatccatcgaccgcgacggcggggccggtgaccatcaatcaacaaccttaattacgctggaaggggtgcatatcaattcgctcaacgagctgcttgatacaaataactccaactaatcggcgttatagcgaacggcacacggaagtgccgtccagattatttattgcggaggaatgaatcgggcagcgatccgggagatagcagaccgttatttaataaaaataatgatgcggaaattattatatccgttttttcagtgcgtgaattctgaagggtaaatttgatgcgtctatttaaacaaaaaaggaatgtcataacctgcggctataccgctctctttattgctttgaatccgccgttttcaggtcatgcggaaaattcatacttgatgccgaatgatattagcagccagcgtttaaccgatagccaacaggtcgcggggtacaatgaagagattattaatagccagacccgaatatccggcccgctggatattaaaaaagcggtaaaaaatgcggtcaactggcatccggcgattacccaggaggtcagcaaactccaggaaatggcgcagaaagttgacgtggcgaaagccaaatattacccgcaaattagtgcgggtatgaataatggttatagtaatacttattctgatgccggatatacgccatcgctggtcgtctcggtatcgcaaatgctttacgacttcggcaaagtgtccagttcggtcagagccgccgactccggcgtggcccagcagcaggccaccgtcatgctgaatatcgatcaggtcgctcacgacaccgccgcggcggtagtgcaggtgcagggctatcaaaagctggtcgacatcgctaaagcgcaggtcgattcgcttaaacagattggcgatcttattcgccagcgcaacgatgcgggggcgtcatcgttatcggacgttgtgcagaccgatacccgcgtggagggcgcgcaatctacgctcctgcaatatcaggcggcccttcagcgctggaaagccacgctcgcgacctatatcggcatcggcggcattgccacggtgacggatgaccttccgcaggggatggacgccgcctgcgcggtatccaaaatcgattaccgctctgttccggcggtattagcggcgctggcccaggccggccaggctcaggctcagctggataacgccaacgcgcaaatgctgccgacgatttcccttgagccggaagtcacccattacctcaacgataactacgccaacagcgcggtactgaataaaacgcaatactccgcctgggtgaaagtgcaaatgcccatctatcagggcggtgcgatgaccgcctcacgcgacgccgcccagcaaagtctggcggcggcgaatgcggcgataaaaaccgcccagctggacgccagccagaagctgaacgcctctcgcgatgaagcggttaatcttgcccagtcgctggggattcagaaacgtcagcagcagctgggtgagcaaacccgggcgctgtatcaggatcagtatcttcagctcggctcgcggccgctgctggatctgctcaacgtcgatcaggaaatttaccaggccagatttagccaggtcctgacggaatcacaactgcgttcgctggagctggactgcctgttcagcaccggcaagatgcgctcggtgttcgcgctggaaaaacaaaatatccagggcgtggagatccgcccatgacctcacaaaacgaacgcgccgggataccgcatttgctcgattggtctaatgcgattgcttttattgccaaccactatcgacaaagcttttctcccggcacgctgcatgccgccgccgagtgggcgacgcagaaaaccctgccggaggcgctccggcacctggcgcgccacgccgggctaaactgccagtttttatctccgggcgatgagaaaatgtcggcctggcggctaccgctggtcgtccagctgcgcgacgggcaagtcgccgtgctcgaaagctttgacgttaataacgccgtcggggtgcggtttgtgaaggagctcgcgctgctcagctactgcccgctggaaaccctgctgccggaaattgaaaagaccattgcgtttcgcccgtcagcgccggaaagggatattcgcaccgagagctacctggcccgctttcagccggactggctgcgtaaaattgtgctgaaagatattcgcccctacctgcacgtgatgctggcgtcttttgccataaacgttcttgcgctgagcggtattctgttttcgatgcaggtttacgatcgggtgatcccggcgcagtcttatcccactctttatgtcctgttcagcggcgtattgctggcggcggtatttgcttttgtgctgaaaattatgcgcgggcacgtcacggatctgctcggcaaacgcggggatattcgcgtttctgaccgggtcttcggccacgcgctgcgcctgaaaaacagcgcggtaccgcgctcgacggggagctttatttcgcaaatccgcgagctggagcaggtgcgcgaaatgatgacctcaacgatgatgaccatcgtggcggatttaccgttctttttgctgtttcaggtggtgctgtttatcgtctcgccgtggctaagctggattgcgccggtggcgacgattctgatgatcctgcccggcctgctgctgcagcgcaagctcgcggcgctggccaataaaaaccagcatgaaaataccttgcgtaacgccattctggtggaaagcattcaggggttgcaggacatcaaaatgatgcaggcggaaagccgctttttgcatcagtggaatagctatattgccattaccgccgagtcgggggtcaaaacgcgcaggctcacccacggcctggtcagctggggaatgtcggtgcaaaacctgctctatgccacggtggtggtggtcggcgcgccgctggtgattaatggcgacatcaccaccggggcgatggtggcggcatcaatgctctcgacccgcatggtggcgccgatgaccgcgctgtgcggcgtactcgctcgctggcagcaggtgaaaacggcgaaggccagcctcgataacctgatggcgctgccggtcgaaggggggcaggacgaaacccgggttcaccgcgccgtgctgcacggcaactacgagttccggcaggcggaattccgctacggccttaacgatgccgcgatcccgctgcgtatcaaccagttatccataaaagccggcgagagaatcgccatccttgggcgaatcggcgccggtaaatcgaccctgctgcaggcgatgatgggcaacgtcgagctggtttcgggcgagctgcggctggatgatttaagcctgccgcagatcgacctcgcggatattcgccgcaacgccaccttgctgacccaggaggcgcggctgttccacggcaccctgcgcgagaacctgatcctcgggcgaccggcggcgacggatgatgaaatcttctcggtgcttaccctgtgcggcgcgctggagtttgtgcgcaaactgcccctcggtcttgaacacgtcattatggaaggcgggctggggctttcaggcggccagcggcagtcgctgctgctggccaggacgctgctgcgcgatccgaacattatcctgctcgatgaaccgacctcgtttttcgacgagcgaacggaaaaggcctttgtggaacagctggcgcagtgggccggcgagcgaacgatgatcatcgccacgcataaagctgcggtgcttaatatcgtcgatcggatcctggttatccaggacgggcagctggcgctggataaacccaaagcaacggtttttgagcaagagaaagcccgcgggcaggtggtgaacatatgagtaaaatccccctgatggccgatcacgacccggtggcgctgctgccggatagcgaagaagacgaggcgaaaattgttaaatcgcggcggctgattctcctgctggccgttatgctgctggtgggcggcatctgggcatggttcgcggtactggacgaagtttcaaccggtaccgggaaagtgatccccagctcgcgggagcaggtgatacaaaccctcgacggcggtattttaaccgagctgaacgtacgggaaggcagcaaggtacaagccggacaggttgtggcgcgcctcgatcccacccgcagcgaatctaacgtcggcgaaagccaggcgaaatatcgcgcctcgctggcggcgagcattcgcttaaccgccgaggtgaacaatcagccgctggcgtttcccgactccctgaaagcctggcccgcgctgctggcggaggagacgcgtctgtaccatagccgcaaagagcagctgagcaaatcgacgcgccagctggacgagtcgttaaaactggtgaatagcgaactggccatcaccgaaaggctggcgaaaaccggggcggcgagcaatgtcgaagtgctgcgtcttcgccagcaggtcgcggatattagttttaaaaaaatcgatctcaatacccgctattttgttgacgcgcgtgagcagctgtcaaaagccaatgccgacgtggccagtctggcggaagtgataaaggggcgcgccgattcggtcacgcgcttaaccgttcgttcgccggtgcaggggatcgttaaaaatattaaggtcaatacgattggtggggttattgcgcccaacggcgagctgatggaaattgttccggtcgatggccggttattaatcgaagcgcggatttcacctcgtgatattgcttttattcatcctgaccagcaggcgctggtgaaaattaccgcctatgattatgccatctatggcgcgctgaacggcgtggtggaaaccatatcgccggataccactcaggatgaagctaaaccggatgtttactactatcgggtgtttattcgcactgactatgattacctggaaaataaaagcggcaagcgttttttaattggcccgggaatgattgccaccgttgatattaagaccggcgaaaaaacggtcatggattatctggtcaaaccgtttaatcgggcaaaagaagccttaagggaacgttaatcaacgggcgagcttcttatcggctacgggtcatggccgtttgcggtccgctagcccggacaaggagcgttgagcgccgcctccggggagtgtgccgggccgagccatcggcgcaatatctaaaatgggtttgtttgcagtctctgataataatttttaaacattcaacgcattcttgaataaacggagaggggaagatggcgctaagtgatttactgcaacaagcctgctttcaggcgaaaaaattaaaatccaccgtattgccctctgactatccggcatgggtaatcttctttagcgtcagcgatggccaatcacgcgcgcatatgcatatttctcgcggtaccagcttcgatctcgcgtggctggcgggggccagggcgctgcaggagtggcgtaaaaaacaggaccgcgaaccgcagtggctgcgggttgacgtcgtggacagcgtggaaaagctcagctggcaatccctcaatgaaaaattcatggtcaccaagcgtaactattttcgctttggcctcgcgtttgacccgcagtttaattgcgcaatgctcgagcaggaaattgccggcaacgcgctgctctacgatggcgataacggcgtcgtggcgccgaatagcgtcaatctggaaaactacgcccggcggcggtttaaacagacgcttagctggccgcaggatccgcagcagccgctctggcgctttaaaactcaggggatcttctgcgatcgttttgggacaaaagtgatggaacagagcgggcgaggttccggctatcgcgttatcggggaaaactggcaggacgagtgcctcgccgaggtgattaaaaaaggcaccgattatctggcccgtcaggtaaagcaagacggcctctaccattacggctggtttccctgtttcgaccgcccggtccgatcctataacgcgctgcgccacgccagctccacctattcgctgattgagggctgggaagcgacccgtcagccgtcggttcgtcaggcgatagaccgcgcgattgcgtacctggttaacacgctgattgaagtacggacgctggacgatggacgcgaggcggcgtttctctgcgacgtgggcgatgagatcaagctcggcggtaacgcggtaagtatcctggcgctggtgaaatacaccgaaacgaccggagaccggcaatatctgccgctgatggcgcagctggcgacaggcatcgcctttatgcaggatccgctcagcggccagtttgttcacgtattgaatagccacgatctgtcgctgaaagccaaattccgcatcatttattacgatggcgaagcggcttttgctcttatgcgcctgtacggcctgactaaagcgccgcagtggctggagatggtggaaaaagccttcgcctatttcattaaaaataagcactggcagcaccatgaccactggctgagctactgcgttaatgagttaacccgctttcgcccggaagagaagtactttcgctttggcctgaacaacgtgcgcgatcatcttgattttgtgctgcatcgcgtcaccacctatcccacgctgctggaattaatgatggcggcatctgagatggtgacccgtctggacgcctcgcccgagcatcgccatctgctggcggattttgaccagcagaagttctggcaggcgctggaagttcgggcgcgctatttgctgaacggcttcttctggcctgagctggcgatgttttttaaaaatcccgcacggatcgtcaacagcttctttattcgccaccacagctaccgcgtgcgtatcgatgacgtcgagcactacctttccggctttatcgcctatcagaaataccatttagcggcaaaaaagccgctgctcccgcaggacgacgcgccgccgtcgaataacgcgatccccgtttttctgctggagacgctgcgcgacgtcggcaacggtattgaggtggcggccatgcggcgggcgaagctctttaccgaacatttgcgcaccgtgccctggatagttaccgcgacgtggaatcccgaattgtccagagcggtgcgggcgctgaaagcgcgcggcgcgctgcccgaagaggtgccggtttataacctctatgagtggctcagcgattgctttgagatgaacgcgatcgctgcgctggcgccgctggtgggcaatatcgagctcaggcatgccgtcaatcccggcgcggatgtcgcggtgggtaaacacaacttcctgctgcgtccgcaggggagaatcatcgaagactatattgatagcgccggcaatattctgctgcgcaaaagctttgacgagaaaaagggcaacgtgcagctaagccatcttgaaattgccctggcgggcggtgaagtcaaacgctttgctcaggaagaggcgttttatgcgtggatgctggaaacccggctggcggaaaaagggcgctggcattttatcgtcgataaaaataaaacgtggaaaagcttcgtctgctcgcggcccgcacagcgcatggcgtgtacgctgagcgcgattattcactcccatcatcagctgtctaacggcgcgctgaaaagctcctaccggcatatcctcgaacagccggagcttgtcgatcggctgattgtcctcaccgatgagcagtggcaggacctgcagctggagggtttcccggccgcgcggatggcggtgatccccaatcatctcgataacggcaatattccggcgaacccgcagaaagcgccgtcgcagacggtcatttatctggcacgctactcggaagagaagcagcatgccttgctgctgaacgcctttcgtaaagtgctgacggcgatccccgatgcgcagctgcacacctacggggtcgggccgctgcggcgcagcttaagcgcgcgggtggcggagtgggggctggagaaggcgatccatatcaacggtttcacctccgacatcgcgcaggcgcataaaacggcctgctgcacggtactttgttcgactcaggaggggcagtctctctccgccgtggaggcgatggcctacggtacgccgctgattagctttgccattaagtacggcccgcgcgacatcctgcaggacagggaggcggggattctggtgccctgcggcgatgaggaggccctggcggcggcgctgatcgccgttatctccgacaagtcgctgcagcaaagtatgcagcaggccgcgctgcgcaacgcccagcgctactacggcagcgctatcgccggacgctgggcggcatggctgcagacaagcgagcgtcagttggatgccggcgcggagcgcggaaacgggctggaaaaaaagcgtcctcgggcggttaacgttggctaaccgtcagcgccttttttattcccgcggccctcaggcgtggcgatgagacgagtcatcgcactcctgctggcatcctgctgctgttcgccgctgctggcgcgcgatgtggtgcaggtttcccgctgcgttcccggctctttgcttcatgcgcatcgcctggaaaaagcgcacatcgtggatgactttcatatttactacagcctgcagggtagggacgccctgcaatatccgcaggatagtaccggcgacggcgtgccggatgtcgtgaaagacattgcgagccagctccaggctgcgaaatatctctatacctcgctgctgggcctgcgctcgccgctgcagcagaaaatttatcgccaggcccgacagatcaacatctacctgctgacgctccccaaaggtcacggcctggccttcgatcgggtggcggcagaaaccatgggtgacggaacggcgctgccctgcggcttaaaaattgtccttaacgccgcgctgcggccggcgcgcaacattacgccagcgcatgaattattccatttgtatcaatacggctacggggtttttaaacagaaatggtacctggaaggtatggcgcgctggatggaaaatgccttcagacccgcgcaggaaagagtcgtgccttcacccggggaggttacctgcgagagtaacgtttctcgcggctatagcgcggccaccttttgggccagctatgcgcagcaggcgtttgccgccacgctagtgccggataacgcgctggcgtatcgctatgtcgacggcagcccggtgtttcaaacccggacggtgcccggcggcgcgatgctggcgcctttttttcagcagcttgcgctcagcagccggcgcatttctggtgaaatgaagctgcccaatatccgctggagtgaacagcagcagcgcgacgggcggtacagtcgcctgatttgccaggcgttatccgcgacggcgcagaataaaaaataagcggtatgcatactcattctgctggctgcgcgggcccggattttgaataaagcctgttcatcttttccggcagatcaataatatccgtcaggatgccgcgcgataaatggatatagccgtcactcttcagcttcgataatacccgcatgatgccgctgcgggacaaaaaagagtggtccataatataattcacggcagtgatgttgtttttaattacatttggttcatcaataagttcgagaagatggctacgtataatttcgtatgcggagagttgtgatatcgtcatgcaatgagcatagactttggccgaactataatcctgcagcatcgccagcgattgccagagatgatatttgacgacctgctcatgaaaaaaacgttgtggaatcaaaagtaagcgcgatgtttctttcgttttaacatacagatggcgggtatatgccagctggcagctggcgccaaaaataaacggtgcgctttcagcattaaggatcatcccatcgcttatgcggtttaacgccacgctcccgtcgaataaaatgaggcactgtctttcaccattccgcgtcaggctgatgttgcgttttttgctaatggtgcagggcgtatgctctttagcgattatctcaatcaatttttcaatatgatcggtgggtttcacgactttgcttaaaatttcatcgcggagcagcgagtgattattcctcttcattgttacccttttaaaacaatgagttgaaaatattattgaatggatgttgtacgcgtctaataatcaataatatgctttctgttggcaacttatcgaacattgccaggattattttcctgctataaattacgatttgtaatctaaaacctgtaattcatattagtcaatataaattgattttttttattgtttttttaagccaggtagatctttttttgcggctggtctttttgcgcaaaaagtcacgttattgcgcttgaggaatttctcgcttcgtttttgattttttaacgcgataataagcggagtgagtcaggtaggtatatgtgtttattaaataaaaaagcgcggcgtttattttttatcctatttgccgcatacgcggcggcaaggaggagatgaaaatagccaacggggttttaaacctggcggtatccaggcgtaaaacccacaaatgactagttgcgcaatcgaggggcctgcagctgctggcgaatggttctggccagttcgtccagcgacggctgttcaggatgttcgtcgctgggctcgctgctcagctgcgcttctgcgagataagtgtgaatcggctggccatcatcgtcttccatcaccacatgataccagggcgcaaggcgcagttcgtcgttagcggcgatttcatcctcttccggctccgtgagcgagtactcgggatcgacatcgacgatcacgcccaggtagcccaaaagcgtgtggcgaacttgttggccgataccgaatttgctggctatcataagcacctcctgggagacatgattacctgctatatgcgggccgattctccacttttcaagttacatgatgcggcaagcaaaccctttcagatacagcccttcggggtaggttgctatcaccgggtggtcggcagcctggcggaactgttctataaattgtacatcacgtccggcatccagggcggcatcggcaatgattttctgaaataaatcggtggtcatcaggccggagcaggagaaggtcagcaggacgccgccgggattcaggagctgaatcgccagcatgttgatgtccttatagccgcggcaggcgcccatcagctggcttttgttttcaacaaacttcggtggatccatcacaatcacgtcaaacttttcgccggcgtcgcgatatttccgcagcagcttgaagacgtcgtcgcggatgaactccgctttagacagatccagcttgttcagctcaacgttctgctttgcgacgtccagcgcctcctgcgaggtgtcaacgctgacaacctgacggcagccgcccatcagcgcggagatggcaaaaccgccggtataggagaagcagttcagcacgcgcttatcggcgacgtatcgacgggtcgccaggcggctgtcgcgctggtcaaggtaatagccggttttgtgaccgccctgaatgtctaccagcagctgcataccgtgctcggtaatcggcagcagggcaggcggcagttcgccgacaaccggcccctgcgccagctccagcccctcttttttacgcaccgcgacgtcgctacgatcgtagatagcgcagttcggaaacagcgtttgcagcgcgctgacaatcgacgcccgctggtattcggcaccggcgctcagcagctgcagtacaaaaaagtcgccaaaacgatcgatggtcacgcccggcaggccgtcggactcaccggctatcaggcgatagctatcgagcccgtcgcgggccgccagccactcgcgccaggtttgcgcctgctgcaggcgacgttcgaaaaaggcgttatcaatggcttcattgcgatcgaagctccagacgcgggcgcggatctgtgaagacggcgaataggcgccgcgggccagccattttccctgagaatcaacgatatcgatggtctcacctgaacgggctttaccttccatccgggcgacggcgccggagaagatccaaggatggcgacgcagcagggatttctcgcgtcctttggttaacactaagcgggggaaaatggagtctgtcatggggctacctttaagcaacgggaatgtcggcaccgaaaaaatggcgcgtaggttagcacaagtggctgaggcaagcaccattccaccggtatcgacaagtgagcgtttcggcacaaaacgcaggcgctttggcacaataaaaaacatgccgggatcttacagtatttcctcaccttacggaggaaaatacgatgaaaacaggattgaaggtcgcagccgcgatgatggttattatgagtgggacggtgattgccgcgccgtttagcgtcagcagcgcggatatgcgcgacggccagacgctggcgcagacgcactggtttggcggttttggctgcaccggcggcaatatctcaccgcagatcgcctggaaaaatgctccggcgggtacccgcagtttcgcggtgaccgcttacgatccggatgcgccgaccgggagcggctggtggcactggacggtggtgaatattgcccaacaggtgactggcttagccgctggcgccggagacaaaaataacgctaaactgcccgccggggcgatacaggggcgcaatgactttggctatgcgggttttggcggcgcgtgtccgcccgccggagataaaccgcatcgctaccgctttacggtatgggcgcttgataccccgacgttgcccattgatggcgaggccagcggggcgttagtcggatttatgttacacagccacgctatcgccagcgcgcagttaacggcgctggcaggaagataataaaaagggcggcatgatgcggaacatccattttcaccataacgcgttaacggcggcggaaatcactacccgtcgtttatgcaaactgcaccgcgtcacgctgttctcgcccgcgatctgccgggtaaaccgcggcagtaaggtcattgtgcagggtgccagcgagatgctggcaacgccgcagcagctgattattttgcccgccgaggttgagctcgaggtgattaatcagccggaaaacgggcttttttgctccgacctgctctctctcacgccggaactgctggcggattttaagcaccgctatatgagcgagccgcagaccggtcgtctgacgtcgctttgcgcgccgctggcgccggaaatgtcgtttatgtggcaaagcgtcctgcgggcggtacgggaggggctcagcgccgagctgcagcaccatcaggcgatgggattgctgctggcgctgtatcaggctggctacgccgggccgctgctcaacgagcggcgcgaggacataaccggtcaggtcaggcaaattattatgctgtcgcctgctgaagcgtggagcgtggcgaaagtggctaaaatgctctttcttggcgaatcgacgctgcgccgtcgtttgcagcaggagtcccggagcttccgccagatcgtggaagaggtccgtatggcctacgcgctggggcaattacagtcgacgtcgcgacccattggcgacatcgcgcaaagcagcggctacctgtcaggctcgcgctttagcgcccgttttcgtcagcactatggattattacctaagcatgtacgctgacggaatttgctatcctctgtattgagtcattggccgaaaaggggggaacatggcaacggtttgcacgatggcgtgggtatacggctccgttcagggcgtcgggtttcgctattcgacccagcgcgaggcgctgcagctgggattaacgggatacgcgcgcaatctcgacgacggcggcgtggaggttctggcctgcggagaaccggaccaggtggagaaacttattgcctggctgaaggccggtgggccgcgcagcgcgcgggtggacagggttctgaccgagccccatcagcccaccagagagtggcagaaattcgccattttgtattagatgcatttaaccggtttaggcagtccggcgatttttgtcgcctgcttagccgggcctttcgggaacaggcggtagaggtagcggctgttgcctttctcttcgccaaacttgttcgccatggccttcaccagcatacgaatcgccggtgaggtgttaaattccagataaaagtcgcgcacaaagcgcaccacttcccaatgctcaacggacaggctgatgccctcctgctcagcgataacggccgccatcgcttcgttccacagggttgtgtccttcagatagccttcgctatcggtctctatttcattgccttcaaagataaacatgattcttcacataccgctgaaaatggcggcagtgtagcaaaaaataaggccccgcataagcggggcctgagtacagacggggagaggattagtctctgctggcgaagccaaggatgctcagcaggctgacgaagatgttgtacagcgagacgtacaggctaacggtcgcgcggatgtagttggtttcaccgccgcggatgatattgctggtctcaaacagaatggcgcctgaagagatcaggataaacaccgcgctaatcgccagatgcagagccggcagctgcaggaaaatgttagcaaccataccgataagcacgaccaccacgcccgccatcagcattccgccgaggaaggacatatctttacgggtggtcagcacgtaggccgagcagcagaagaacaccagcgcggtaccgcccagcgccaggccaatcagatcgcccatacccgcagacaggtaggcgttaagcattggccccaggatgtagcccagaaaaccggtaaaggcgaacgcggaaatgatacccgttggcttattcgcggttttataggtcaggaacatcaggccgtacataccgaccagcgtcagaatcagacccggagaaggcagcatcagcaccgtgctggccgtcgccgtaatagcggaaaatgccagcgtcaggctaagcaggaaataggtgttccgcagaactttgtgcgtgctaagtagcgatgaacggtctcgcgacgatgtaattatacgatccatgagtcactctcttatgacagatgtaattaataacgaagcataaaaaaaacagggcctaagccctaatgcttttacccatctttactcaaagtcagcgggctgaatgcagcacattattccaggaaaatcgggataagtggcatttttatttgttcgccttccggagtcagatcgaaatctgataactcactgaaaaatattgcgttatagccattctgcgactaactctggagagggtactcacgaagcgtaacaaaggcaagggatatgaaaacacaaaaatataatcacatcacacgcgtactggtggccgtcggtctgttctccatggtcatcccggcgctggccgctcaggtaccgccgggaacggcgttggccgaaaagcaagaactggtcagaaataacggcagcgaaccgtcgtcgctggatccgcataaagtggaaagcgacgttgaaaacaacattatcagcgatctttttgaagggctggtcagcgtatcgccagcaggagagattgagccccggctggcggagaagtgggagaataaggacaacaccgtctggacgttccacctgcgtcccggtgtgacctggtccgacggtacggcgattacggcgcaggatattgtctggagctggcagcgtctggtgtcgccgctcacggcgtcgccttacgcgagctatcccggcaatatgcatatcgtcaacggggcggagatcgcgcaggggcaaaaagcgcccgagacgctgggcgtcaaagcggtagatgatgccacccttgaggtcaccttaactcagccgaatgcggcgtttttggcgatgctggcgcacccgtctttggttccgctcgataaagtgctgatatcgcgctacggcgacaaatggaccaaaccggagcatatcgtaaccagcgggccctataagctgtcgcagtgggtggtgaatgagcgcattgtggccgagcgcaatccgcgctactgggataacgcgcatacggtcatcaataaggtgacgtacctgccgataagctttgaaaccgccgacgtcaaccgctataaggcgggagagatcgatattgtgtatacggtaccgattaatcagtttgcccagctcaaaaaaaccatgggcgatcagctggatgtttcgccgcagctggccacctattattacgaattcaacaccacccggccgccgtttaacgacccgcgcgtacggcgggcgctgaatatggccctcgataaagacattatcgcggagaaggtgctggggcaggggcagcgtccggcctggcttatcagccagcctgacatcggcggggtgaagctgcacaatcccgagtacgccagctggccgcgcgagaagcgtatcgccgaggcgaaaaagctattgagcgaagccgggtataatgagacccatccgctggtctttaatctgctctataacacgtccgaatctcaccagcgaattgccatcgccgccagctcaatgtggaaaaagaaccttggcgttgaggcgaagctgcaaaaccaggagtggaagaccatgctcgacgccatgcatacgcataattttgacgccgtgcgctacgcgtggatagccgactatgacgacgccgcgacgtttctcaataacttccgcaccggcgacagtgaaaataccagccagtacagcaacccggcctacgatgaggcgctgcgcaatgcggcaaaagcctctgactcgacggcacggggaaagttctaccagcaggcggaggatctgttaggtcaggatgtcccggccattccggtctatcactacgtgcgcacccatctggtcaagccatgggtagggggatttacgccggataagctggggtattactacaccaaagatatgtacatcaaaaaacattaacgcgaagagggcggcttgcgctgaaaatctgcgcaaactgcctgaatttcagacgaataacgcgtttttgtttaattttaaggcagttgaataaattggtgctttacagcctgaacagaggtgtttatagtgcgcctcattggaagcgtggccgagcggttgaaggcaccggtcttgaaaaccggcgacccgaaagggttctagagttcgaatctctacgcttccgccaaattataaataaaatcaatagcttgaagaatggttttgattttatagttcataaagtgatgtaaaaaagcccgtttatacgggctttttttacatctaaagtccgtcatttgctcaataaatatcctttcactagcaatgcccccttttcaggtaagaggcattgttgtaagtcgatacctatggcaaagatactttgttattcgtgcccatcagtatgctactttgtgatggtaaaaatttccctttattttcatctcttccttgtaataatatttttgcatcatctttattatagtcacgaacggctttagctgataactcaccgataatagtgtcagatgagcgtagccggttaataataagaacacactttgtgtcattaaagtcggacatcatgttttgatctccttcgctatcgccagcaactaatattggtcctgtatctttgtaatgttgttgtataaatttctttatggtttcagttttacctttaccttgcgtctggggatagtatggatcgaggctgtgagtcaatctaccttctttatcatataagggatgcattgcatagacatgagactcaggaacagaaaaaccatattttcctgtagtaacgatgctttttatcacatctaaagcagaagcggaaatgacataaacatcaactcctgcctgctgtaggtttttatataatgtctgcatttctgggatcagcctgaatccgtttttccatgttactgatacgataccagctcggcctgccatatctgctgggcttacccatgtcacctttccgataggctggttattttgccactcaatagtatcgtgcactaaatcagctacttcttttttggacatgccagaaaaaagatacgtcacccatggataagatacttcatggtcgaatgacccacctattgcatcatataaatatctcattttcactataaaattcatataattagaattttttttaatttcatcaagcgttttattacccgcaaatccgctgtaattattgtatagccatgtgtagctatcaataatgttttgaccaatgaggtttatattaaccggttgatgatttttattattataatccgagttaaagtttgaaggcggtatatctttgtaaattatctctttcaatatctcaggtttcatagaaaatttaaggttttctagttgatagataagcgttgcctcttcgatatccagaaaagctgttgtgttgtcaaaatcaaaaacagcatataaagaatgcgctggcttctgctttgcttcttgaatgagcctgtcaatttttcttgagttgaactcgtcccaattgccgataactatttgctttttttggggaatcgcagtttctaaattttgtgacacttgatttgtgttactggcactggccgttgttccatatactccaaaaaatgcggatagtagtgcatatattattgtcattttcatgatttattccttttttagggtgcattaccatctgtagcaaaaagtaaaagctagctatatcaaaaattggcaccctgatcatgaatgtgatggttatcatattttatgaatatatgaaaatggtgagggagtaagccagaattatctacagagaaatgtttagtatgacaaggtagcaggcccaaaacagttcgaactatctccgagtgttattttaatgtcacttatctatctacggctagtcctgatggttcttttgctttcttcggcatcgtgcaagcctgtcatacaaaccccgagctatttaatcgctcgggtttttttcttatgtgccgctattctgtatgccattcggttgagtaacccgctctggccgtttgaagctgacaggtgcggttcccttcgcaaagtccccctcatgcgcagttgaggggggggggctcagaagatattgatgctgtagccgacgataaacttcacgtcgttacgatcggttttatagttgctgtctgtcgcccggaagagcgccgggagcagggtaaaggagaggcctttcgccatgccgtccgccaccagatagcgagcggaaagatcgaacgacaccatgttcccgtcgtactttctcgccgaaccggttttactgacatcgctaaccacgtgccagccgtaggttccggcaccgcccagggttaactccggtagattaagatcggcgaagttataactcacgccaaaacgaaccgcgcgggcgccggaaacgttaaagtcttccagctgcgacagcgtcggctgataatcacgcttatcggagttcgcccacggggttaagcggaagttgtaatctccggtgttcggggcgtagttctgactatagccaagggaccacacggtgttgtcgtggctcaggttaaaaccaacccccacataatattccgttgcaggatctttaattttcgacagttcttcaatgtagcgcgcaccctggtagaagagcttactctgcagggagacatcctttgtcaacgtatcgtgacgctctacctgtgcctgccagttgcgacggtagcctttaccttcgccatagcccacgtcaagcacggtattgccaaagttatagactgcgcccaccgtgtgaatgtaatcgatgattgcaccggctttaatggttttgccgttgtcatcgagtccggcggcgttgttctggtgccaggccgtggtcatcggtttaaaatcacggctccagtcgttcttgaagcggtcggcccaggcgtaggtcagcctcagtttgtcgagggtcagggcactgtcaaagccgcgaaaagcgtgagggttgaggccccagctgctttttacggtaccggagttaatgggggtatagcccgcggccagcttgaagttggtgcctgcatcgccaaggttgagcttgagtgcggcaaccgacacgctcatgtaggacttctcgcacgggctgaacttgcccggctcgccgcaatcgtagtcgtagtaaaggatctccgactgaccgacggtatgcccgagcttaatgttggcgttgccccagaaatcaaagccaataacgtcctggtaatagcctgaaatatagctaatcgccacgttaccggtctggttctggatcccggctggacccagtccgtatttaccggtcgcggggtcttttacagcacgatgacgaatatatagtgaggtattgagatttaattttccttcatcataaaacgctttctcaaactgagaaggcgcttcataatccgtttcttcttccgcaaaggcatctgcggcaataaaaagaaacagcggtgtgcacagagaaactctgagtctatgacttgtcattattatataccttataaaaccatgtattatagggcgaggggatgtactgcttatttaaaactcgtgttatttatgagctccgggatttgcgcaccatatttttcgaggagatattcattatgttgtgcggaattcgcaatgttaccgctcaaaaataccggcagagatttattttcactccccaggttcgctatgatttccgcgaacagggtgtgcataataaacagcccggtcattgaggaaaccggcgcgaacggcgttgcatgctccgtaagggaaagcaccgcatcaccgattggcacctggttatcaatggcgacatccacgcagtcccgcagcttaaggccagccttgtgcttcgacggctgggtctcggcatacagaaagctggtcagcgccagggtaaatgccccgtgctgttttgcccagagtgctgcatcgaccggagcggggttaatcccggaagttgagataacaatcagcgcatctttactggtgatcgagaatttcgccagatgctcagcaatatagtcattctgtttttcataatatgatgaggccgccgccccctgatgtaacattaaaggttcgataaatattggccgaaccggggcgatacctccggcacgataaaatacatcttcagcgaaaatatgtgagtggccacagccgaaaatataaattacacctccctggttaatgatttttgccagttccacggcggtggaagtgattttatggctttgctgttgagtaatgtcgttaagttttttctggacgatatctaaatagctctgaatcattgtcataaccagtatcctgaccattgtggttggtagactcggtataacgcttccatatagaagtaatctccccagagattacattcatcgatgcctttaccgagggcataggcgtaaacaccgtgtttaagtaagccttcgcagacatcatcatcgcgggcagacgcgccgcgcattaatgccagcagacattgacgcgccagtttctggtaaccggcatccggaaagtgcttatgcgcttccagcaggccgcagatcgcaatcgccagcgcggagctgtctttcggggcgtccggatctgcagccagcagcagatcccaggcgggaacgccgtcctccggcaggtagcggaagaaatactcgcaggcctgctgccaccgttcgtagtggtcggtttcgccggtggccgaccagtgaagcgggatgccgagaatggcccacgcctggccgcgggcccagcaggagttatcgctgtagccctgaaaggttttcccgtacgaaggcgcaccgcttgtctggtcaaaatagaaggtatggaaagtggagccgtcttcgcgaaaaatgttgttgatgaccgccgcatagtggcgttcagccacttcccgataacgtgattcaccgctgatctttgccgccacgtggagcaggggaaggttaatcaatgaatcgataataagccggtactcctgcgggtcgttaagcgtcccccaggcctggataaaaccggcgctgtggtgaaaacggtttaccagcagatcggccgccgccagaataagcggggttagcgcttcgcgctccgtcagtttccagtacgcgactgccgacaggctataaaggaagccgatatcgtggtgatcgagaacgtggtgcgccgccaggcgggctttaaaactcgccacgttgcgttcaacgccgtccaggtaggcgcgatcgccgctgaactcccaggccattgcctgcatcccggtccagaatccgttggtccagtcgttattctcttgcagaacgtagcgattatggatcgtgcaggctgaggggaatttctcgccgtacagacccatgttacgcgcgatgcgccgcgcgcacgccgtcagctcatcccgacaggtgtcgggcgtgagggcaggaaagggcagcggtgtgaggcgattcgacagactctctttcatgatttttccctacagcgtgaatacgcgctctttgtactgactcatcagcatgtcgttgtattctttaccgccgggcagattgatgctgcgcatcaccggcggcgcgataccttgttccagcagcatctcgatgcagcggatcaccacgttattgatgatgaaggacgcagacagcgatgataccggaccggtcatgatgttgccgttatccatacttagcgtgcagtcaccggacgggcagccgttatcgagagtgacatcggcatagtcgcgaatgctctcgctcgttggcgtcgactcatcggcgtagcgggtgataaccaccagcttcagccccctctctttgaccttgcgtgccagctcaacgtgcagcggtttagtgccggagttggagataatcacaaagcagtctgactcgcgcagatcgagcagcccggagaagatgtcgccaatccctttcagcgaatcaaaccagccggttggcccatagaactggtcaatggctttggtgttgaccaggccgcccgcacgaccggccagctcaaccgccgcggcaaacgagtgcccggagccaaagccgtgaataatgccgttggctttgacgcactcggcaaacagcgccgccgcctgctcaacttcagcgctctgagtaagaaacacctgattcagcgtcgctaaaacatgctgataatactgctgctgatgtggtgacatcccttatcccttatcggcttttaaaaacgtggtgatacaggcgttcggctcttccggcgtcatctgcgccgtcaccgccacgcctttttccagcagcgcgttgatggccgcgatctcagcatcgttgacgctgaccgagcgtttgatctggcggcgatcgtctttgttggacatattgccgatattgagctgggggagggcaatcccggcgttcatcagcttcagcgccagctccggggtcttcagcaggatcagtacgcgctgaccgtcgtaatttccggcgaggatattggcgctggctttctcaaaagagagaatagaggtgttgcagccttccggggctgcactgcgcagcagcattttctctacgtcgtttgcagctacggcgtcgtcaatcaccataatacggttggcgttgaagtagcttacccagcgggtggccacctggccgtggatcagccggtcatcgacacgaatatgcacaatacctttcatgataagttccttaaatcaatgtgttacttaaccgagaatattcaggttgtagccgataatacctaaagcaatcaggacaaaaatgacccgagtcgagttcatctttttgagccccagcagccaccaggtgaaccccacaaccagcagcggaataagcccgggcataatctggtcggcaatgctctgcagcttgagcgacacttcgccgtagctgaattcgaaattaagattcgccttcaccaccgaggggataagcgccccgataaccgtcagcccgagaatattggctgcgcgggtaattttgttgaggctattggtcaaagaccccagcaggttgaccccttcctgataccctttgctgatgctaaagcgcataaacagcatgcgaaccagggcgaacagtagccagagaacaagccccaccgggttgccctgcagcgcgaggtacgaagcgacagaaccgataatggtggtcggaataacaaagaacagcgtatctccgatgcccgccagcggccccatcagaccggttttgatcccggcaaccgcatctttgcccgcaagcccggtttgctcttccagggcgatgttcaccccgaggatccccggcgccatggtgttgttggtattaaagaactggctgtgtaccttcgccgcgtccttctgctcttcgggttttgcgtactttttctcaaggaacggatagatgctgtacagatagcccagaccctgcattttttcgtagttccagcctgactgaccgaacaggaaccagcgccagaacacgcgttttaatactttattcatcgcccattgctccatttgccggggattcggtagtttgcgttacctgtttttctgagttgaagacgtaaagcgcaattgccagacccagcagcgcggcgcccagcaccggcactttcagataggccgccaggaaaaagcccagaatcagaaacgagatgttcttcttaatcggtaaatagcgcagcaggatggagatacccagcgcaggcagtaggccaccggcgactttaagaccgttcatgatggacgcggggatccaggtcacgacgtcattaacaaaggttgccccgaggatcagcgccaacagcaccggcagcatacgcgagagcgaaataggcacctggcccagcaggttcatcctggccgccgccttcacctgaccctcttcaatcagcctgtcggccttatgatggataaaggtgttgctgaagcgggcgaggatatccagctgtaccattaagagaccaatcggcaccgcaatggtggcgccaaacgccgcgccctggccgctgatgatcgcgaaagtggtacccagcaccgcaccggtcatgtagtccgggatcgacgcgccgccgaagttgcccacgcccagtaccagcaggttcagggtgccgccgacgataagcccggtggtcatatcgcccataatgaggccggcaaaaaagcccgccatgctcggtttcactaacccaagcgtcgtgttgttgccgtcgtatatcgccagccctgaataaagcgtcagtaacgctatctgccagaccgcaatgtgctccattttttactcgtctccgtcgtctgtgtgggcggcaagcgctgcctgctgtaaatggtaaataccatcacgcgccgtagttattatttcattcagcgaggctggcgagtgactttcatcaattgccatggccatttccagaattaaatttaaattcatcccagagagcagggtgatattattccataggttgttagtgacaataatctccattgcggagttatacggcgaaccactttttaaatcagagaggataataattttggattttgctgcgctaaggatggtgattttatcgagaagttcctgtttaaatactgctatccctttctcaccatccagttcaactacatgaaggtttggctgcgctccgagtattaattctgtggcctgtctggcaccgctggcgaaacccccatgtgagattaataataattggttcatcctgcccccttatctggcgttcttatttcaatataaaatgattctaaccgtttccaggtctcaatatattcaatcacctgaccttgctcgtcgtgggtatagcgtttcatcatgataacgggctggtgagccgtgagctcaaggtgccgcaggacttctggcgcagcatcggtcagggcgcagatggtctgccgatagggcatggtgtacatatcaagaccattgttaaccttaaaagcctcataaatagagctgagtgccgaattcttaatcgtcaattgactggcgaagtagcgggccggaatatgcgaaatctgtaatgcataaggtttgttattatcaaactttaagcgcgcaatacgataatatctttcatcatcatttaacccgagcttttctttaatacacggatcgttttccagttcacaggcgataattttaaccgactgcatgccttttaaatcgttatctgattctgagaaaataatgttctcattacgtttggctttcgaaacaaaagtgcctttaccctgatagcgaatcaggtagccttcattcaccatttcgtgaatagcgcgaataaccgtggcggaactgacggagtaacgctcttttaattccgactcactgtagaatttttccccgggtttaaaagtgccgtttcttatttcatctaacagtgctgcctttatcacctggtatttcgttgactgtgcagttgctttcattgtttcgccagtttctgtttacatttattttatttcgtaggcttacgatacccgtacccgattgtccgatcaacctcccaacccaacttaaccggttaacctgttaagttatttcctggactgtgatgcatttcgcaatttcgccccgacggagggggcaggggcgaggaatttttgccgcagcggccgggcgtgaacgcaaactgattgccgcgctattgcgctggcgagctgagaaaacggagcgcccgcattcaacaaccccggccagtacatcgcgcggggttttctttttacagggcgccaatgtggtgcttgcgtgccctaacgcagctgcgcgcaggcttcggcaatccgctgacaggcctgcgtcagcagtccatcttctaccgcgtaggcaatacgtaaataccccggcatgccgaacgcggacccgtgtaacacggccacctgagtgtgttctaacagccagttcgccagcccactgtcgtcgcggagggtttcgccggtgggcgtcactcgcccaatgagccgctggcagttggcaaacacatagaatgcgccctgggggatgccagcgctcaggccctcggtagcggctatcatccccagcacctgctgacggcgtttatccagcgtgtgcagccagccgtctaagaagtccgccgaatggttaagggctacgaccgccgcagcctgcgaaatcgcgctggggttggaggtgctttgtgattgcaggatctgcatggcggcaatgagccactgcggcccgcccgcatagcccagacgccagccggtcatggcgtggcttttggacacgccgttcaccgtcagcgtgcgcgaaaccagctgcggcgcggcctgagcaaacgtggtgaacggggtattgtcgtaacgcagcggctcataaatgtcgtcggccatcaccagcacctgcgggtaggccgccagcacgtctgccagcgcgcgcagctcccgttcgctgtaaatcgccccggtcgggttgcccggcgaattgaggatcaaccagcgcgttgacggggtgagggcggcggccagttgttccggcgtcagcttccagccgtgttgttcatcgcagggcacaatcaccggttcgccgtcggccagagagaccatatccgggtaagagacccagtagggcgcgggaataatcacctgctgcccggcgtccagggttgccagaaaggcgttgaaaataagctgcttggcgccgctcccggcgatgatctcttccggacggtagcgcagctgattgtcgcgagcgaacttggcggcaatggccgccttgagcgctgcggtgccggaaacggcggtatacttagtctggtgatgcacgatagcttcaatgcccgcatagctaatatggggcggggtagcaaaatccagttccccttcgcccaggttgataacctgcttgcctgcggcttccagtacccgtacctggtcagaaatggccgcggtcggagaaggccgtacggattgcatacgacgggcgatttgactgttattcataaatcctcttttgtatctaatgattcaattaatacaattaggtacccaacatcagcaggaaactcgccgtgtcaccgatctttattctcgataacagctccgcgcccgcccgctacgggattaccgccagcctgtgggccaatcgtcttgggttgcccctctggagccttcgccccgacttcgccggggatgtacccgatagccaccagcacgtcattcgtgcagggtactgcgtgaccagcggcctctggcgcagcgatacgctgcgtgaagaggtgcgcgatatcgcccgcctgccgtcatcagacgccgtcattgtgctggcgtcctcgcaggcgccgcttatcgccgacctgccgggtcagcggctttacagcgacgaaagccgccaccgtctgacgctcagcgatgggcaacacacgctgttagatctcaccgccgaccgctatggccgctgggatagcggcgtgtcgtcgtctgccggcgggtccttgcgcatcgcgctgattggccgcgaggcggaccaccgtctggtctatcccgccacgctcggctcgctgggcgatgccgcggcgtcgctggggctgaacctggaggtccatttctttgcgccggtcagcctgtccacgggattacacgagcttcaggccttccagggcgtggtgctgccaggcggttcctcgatggcggcggtcaacggacaaatccgcgtggcggaagagaccctggcccgcgggcagccaacgctggggctgtgcctgggaatgcagagcatgatgaccgcagccgtgcgccgtagcccgggtttcgaatcggccattcccgcggaagtcgcccccgatgaagccctgcacagctttgttccctttgccgatggccgtcatcgctgcggcgtattccctttttcctccgggcttatccccggcgatatccgcgaaatgcactacaaccatcgctactgctttaaccccgagttattgccggcgctgtctcccggcggggtcagcgtgagcgcgcaaagcgacggtatcgtggaagccgtttcccagcctgagctgccgttctggcacggggttcaggggcatccggaactgatgtcccgcccggatgcgccccatccgctgttcgtcgcgttcctacaggcggcgcttaacgcgccagcgtaaccccgctgcgatggtcgctggcaagctcctgcattacgcgggtcagctctgccagcgccgcgtcgccgatcggttttaacggtgcgcgtacggtgccgccgttaaagccgcgcagcgccatcgccgctttcaccagctgcggctgaccgtgtttgcgcgccagcgcccgatacgcgtaccacagctgatgcaaatcgcgggcggtggcggcgtcgccccgttctacggcgcggaaggtattgacgatcagctccggcagcgcgccgctgttggtcgtgctgacgccgtcaaacccggccatcatcggcccgaggaaagccagatcggaggcgcagaacaaacgcagacgcccgcgcaggcggttggcaatctgatcgatggcggtagggttgagatcgccctgtttgatgccgaccacgttcgggatctctgccagccgttccagcagcgccggggagagggtgatgccgatgcccggcgcgttgtacaccagaatgccggttttggataacggcgccatctcattgaagtagctgacgatctgttcgtcagtgatttcgctaacaaagggggcggtgaccatcggcagcccgcccagctcgcttgccagctgggtcagctcgcgggcgtcgcgcgggtcggaactggcgctgcacagcatcaccgccacgcggtcgtccacgcagcccatcacctcatgaaacagctcgcggcgttcttcgacggtcattaccggaaactcaccgtaggtgccgccaatcagcaggccgtcatagcccagatcaatcacgcgttcgatattttcacgcagcgccgggaagtcgatcgcgccgctggcggtgaacggggtgacggtgatgttgaaaatgccgcgcaggcgttcacggcactcgttgatatctttcatctttctttccttacagcagcgttaatgggcgagccagggaacccagctggcgatatccggtttcagtcaccaccacggtttcgctgacgccgacggtgaattgaccgtagatacgcagggccggcgggatgtggaaggtcatgccaggctgcagctcggtggtgacgccgctgtacaggctgagaatgccgccttcgccccagtccggcgcgaaggcgataccgatggagtaaccggtgcgttttttgaagttttcggtgaatccggcgcggtcgatcaccttctggcaggccaggtgcggcgcttcgcaggtggcgcccggacgaatggcgtcaagggcggcctgcagggcttcctgacaaactttttccatttcgatggcgatagcgggcggacggcccagccaggcggagcgcatcatcgcggcgtggtagcgatcgtgggcggcggacatctccagaaagaccgggtcgttatcctgcatcacccgacgtcgccacgtgccgtgcggcacgccgctgcgtgggccggtagaaaccagcggttccatgccgacatactcggaaccggcggcaatagcggcccccatcatcgcggagaccagcgcgttttcgtccgcgccgctgccaatcgccgccatcccggcgcgcatgcccgcatccacatagcgcgccgcgagggcgattttttccacctccgccgccgatttcaccgcgcgcagcggttcgatgacgcccgcggtatcggcgatggtgccgagcttcgcctgcagggcttcatagacggcaatcggcaggaaccagccgcgtttgtccagcccaatgcgtttgttgagccagccgcgctgttgcagcatgcccaccagaaaatccaccgggttatcgccatcctggtagatggcggcgtctgaaataaaggtgttggcgataaagttaaagtattcgagctggcgaatcacaaagaccggatccccttctaccggcagcagcagcgcctgaaaggtgtaatagcccggcgtttgctgaccggtaagccagaaaatgttttccgggccggtcacgatcattacgtccacgcccgcgcggcttaagcgttcgcgggtacgctgaatgcgctgcgcatattcgtcggcgcgaaaggcggactcgctgccctgaatcacattgttaacatcttgcatcattaaactcctggagtaagttggcccgcgcggcatcgaactgcacgcccagaccgggagagtcgttaacggcgaccatgccattgcggtattccagcccgctgacgggatcgtcggttaatccatcggcgccatacagttcggcgaatgccggttgcaccacgcggcacagctggagcgcggcggcggtggcggcatggccttcattcatctggccaatcatgaacggcacgtcggcgagtcgcagacggccggcggcggcaagcgtcggagcaagtccccccagtttcaccagcttgagatgcccccacagcgcacctttggcggcgataagccgggtgatggccgcctcgctgttgaggctttcgtcgagcatgatcgggatgccgtagccgtacagttcagcaagctggctatcgtttgccgggcttaacggctgttcgatatagctgagattcagctcgcgcagataagggaacgccgcgtgagcctgcgccagcgaccactggccgttcacgtcaatcgccagcgaaatctgctgaccaaaccgcagcctcagcttttgcaggcgggccaggtcggtggcgaaatccgctatccccgtgcgtaacttcagctgggtaaaaccgcgatcgacatagcgctgcgcctgcgccagcatctctgcttcgctgccccagaacagcgtctgattggtgtgccaggcgggcaggccagctggcgcccccagccaggcggcgacgctgaccccgttctgacgcgccattaaatcgtgcaacgccatatccagcgccatgcgcgacggcggcagcagcgtgcggtcctcctcgtgcagcgcggcaagttgcgccgcgggctcctggcgccagtcccaaccgttgaggcgctgaagcaggttattcagcacctgctcttcgcggtagccgtgcaggtagcgaatgttgagacgcacttcgccaatccccgtcacgccacggtcttccaggcgcaaccagagggtgtcgagcgccgtcaccgggccggaggcggcggtatgcagcgtcacgccggcgtaatgcaggtctccccgaaagagctgcgctttcataaatcggacgccggcggcagcatggcgagcgcaatatcgagatagatatctgccgcggcgataaattcatcgacggggacgaattcatcgggcttgtgggccacggacagcgagccggggccaatcaccacgccctttgcgcccagcgaacggaaatgcaccaggtcgcagccgccctgaaaaccaaacgggccgggctcgctctgtccgtgacggcggcaggcggcaaggctttgctcgacaatggcttcgctgctgtcggtttgcgtcgcgccgccggtggtgggctgccaggcgataatttccgcttccacgtttgcctgcgcgtacgcgtggtcgagcagctgttgcagttcggctttaacaacctcttcgtcttcccccggtaccatgcggcgatcgagcagcagctcgcagctgtctggcaccacgttgtccgcatggccgccgtggatgcgggtcaccgtcaggctggcgttgccgaccagatcgtggcagcggcaacgcacctgctggtggtgggcctcttcgatcagccctaaaaggcgcgcggactggtaaatggcgttaacccccagctccggcgtgccggagtgcgcggtgacgccttttacccgcacgcgaggacgcaagctgcctttgtgagccgagaaggtcgcattcgatgtcggctcgccaatcaccgcgaaatcaatcgccggcggggtgtcgcgtacgtagaatttcgccccttcgctggcgacctcttcatcggcggtgaacacgcccatcaaggtgccggaccagcgctgacggttggcggccagcagacgcagggcttcaaccatcgccaccagcgggcctttggcatcgcaggcgccgcgcccgtacaggcggccatcgcgttcgctgagggtgaagggatcgctcgcccagccgctgcccgccggaacggtgtcaatatgggtgttgaaggcgaagcacggtcccggtccattgtgcaggacggcgataacgttggtccgccccggcgcgtattcgctaaaggagagatcgaacccggcggtcagcagccagccttccagacattcggcggcttcacgctcatggcccggtggattttccgtattgatggcaaccagcgtcgctaaatcctttttcattcgtgcgctgtcaacctggtaactggacataggaactccgtgattaatgtaatatttgcgtcaggaagcgctgcgcgcgctcgctgacgtggccggcgaagaaatcaccggtgctggcgcgatcgataatttcgccgtcttccataaaaagaatgttgttggcggcccgccgggcgaagcccatctcgtgggtcaccaccatgctggtcatcccttccgcgctgagctctgccatcacttccagcacttcgcggatcatctccgggtcgagagctgaggtgggttcgtcgtagagcatcagctcgggcttcatcgccagggcacgggcaatcgccacgcgctgctgctggccgccggagagctcgtccggaaagtggtctgcgcgttcgttgatgcgcaccttcgccagcaggttgtccgccagcgtgcgggcatcaatgcggttcatccccagcaccgtcattggggccagcatgatgttttccgccgccgtcaggtgcgagaacagctcgtagttctggaacaccatgccaatacgctggcgcagtttgtgcaccggcacttcgccccggctgatgtgctggctggcgaaaaagacgtcgccgctgtcggcaggtgagagcatgttgacgcagcgtagcagggtggattttcccgagcccgatggcccaatcagcaccacggtttccccgcgctgcacctcaagtgagcagttcttgagcacggtctggcgaccaaaagtcttatcaatgccgatcatctccagcagcggtttctcgctcatggttcctcccgggcgattttcggtaatttaaacaggcgggtcagtcgcttctggctcttgctgcgccgctgttttggatccagtacgctttcaagccacgactggaagatcatgaacaggctggtgagcagcaggtaatagagaccggcggcgcaaagcgcttcgaagtagcggaagctggcgctggcggtctggttggcgaccagcagcagctcctgaacggcgataaccgacaccagcgcgctcgatttcagcatgctgatcatctggttacccatcggcggcagaacgatgcgtgcggcctgaggcagcacgatttttcgcatgatctgcccgtgggtcatcccgagcgccatgccggcggtgcgctggccgctttttacggcctgcaggccagagcgcagaatttccgccatgtaggcgccttcattaagcgaaagcgccagcactgcacaggtaaacgcggagaagcgtaagccgaagcctggcagcacgttgtagacaaagattatctggaacagcactggcgtcccgcgaaacagccacaggtagaaaaaggccagccctctcccggcgcgaaacggcgcttcctgcaacagcgccaacaccaggcccagcaccacgccacacaacagtgagcagagggtaatcagtagcgtcatccacgcaccctgaacaaactcgggtgagaggaagtactgccacattagttcgatcgacatagctttctccggttaatggcaaaacggtttagaaaagggcaacggagtcagggaagttccatttctcaatcaattgcttataggtgccatttttgacgagaccctggagacctttctccagcagggcccgggtttcggtgtcgcctttacgcacggcaaacgcgatatgggtatccgcttcgaattcgtcgccaaccgcggcaaacatgcccgctttttcggttaacagggcgacggtccccggcgtggagaggaactcggcatcggcgcggccctgggcgacggcgacggcggagtcggtggcggcggggaaggtcatgacgttaatggccggttttttggcgtccaggcagcgctggttgtctgcccgggcctggctctcttcgatcccgccgagcgtcacggcgatgtttttgccgcagaggctcaggtcgcgtccggtgatttttgccgggttacctttgctcaccaccacgcggctgccgattttcagatatggcacgaagtcgacctgcgcggcacgggtcgggttgacgtacatggcggagttgatgatatcgagacgtttcccctgcagcgctgggataagccctttgaactccatcggcatcggcgcaggcgtcagccggatctctttgcttagcgcgttaatcaggtcgatatcgaagccggtgagcttgccctctttcacgaactcaaaaggcataaacgtcgccgccgtgccgtaggtcagcttgcccggggcgatggtttccaccgctgcatggcttaccagcggaagtgcggtcagcgcgaacatcaaggtacgcacgcggcgaaacagtaaagaattgctggacatagtcgtctcctggttaagatttaaattgaatttattgagtcaataaatacaatcaagcgtgtgaaaaaatgtctcatcctggtgcgtattgcacgctaatcgtgcagtccttgctttgttttgctgcgttttgttgcccgtgatattgtatatatcgatcacaacaatgcatttcagggaaccgttctccatgcagcctgactccactgcgagcagtcgccggatcgcccggcaaatactcgacctgatatccgaagcaaaattcgatccaggtcatcatttacgggagcaacatcttgccgatgcgctgggcgtgtcgcgtacgccggtgcgcgccgggctaaaagagttgacccgaatgggggcggttgaagcgcgtccgaatcagggctttttcctgcttaaacgcagcaatgagctggagctgctggagattgagcagtccaagagcaatgaccagaagctgtacgagcagctggtacacgatcgtattgcgggtgcgctgccggaatcgtttacccagaccgaaatcagccagcgctatgatgtcgatcgcggcgtgctgacccgtacgctggtcaagctatcggaggacggcctgattgcccgtaacgcggggcacggctggcgcttcctgcaaaccctcaactccgatgtcgccctgcgcaacagctacggttttcgcctgatgattgaaccgacggcgctgctgacgcccggcctgcatgtggacaggcagatgcttaaacgcctgcgcgcccggcatctgcggctcatcacccacccggacattactcaggtgccggcaaaagagattttcgaaaccgacgctgagtttcacgagctgctggcagaagccagcggcaacctgttcgtgttacaggccattcagcaacaaaaccggctgcgccgtctgctggagtttggcagctatcacaataagcgccgcgtaaaagcgtggtgtgaagagcatgttgccatcatcgatgctctgcgagagaacaagccggaactggcggcagagttgatgagaacgcatctgcaatacgcctttgaccaggtcaatgttaaaaacgcccacgcataactggcatcgctcttgcacatgttgcttctgaaaatacaatcaggagcacttatggattttcagatacaacaacgtgtggcgctggtctgcggtgccggcagtggtctgggacaggctattgccctgtccctggcgcaggaaggggtgaaagtggcggtcaccggccgcagcgcggaaaaactggcgcaaacggtggaacgtatcaccttattgggcggtactgcccgcgcctggcggttggatctcgccgccccggagcagtttgatcgagtgattgccgatatccgcgagcggtggggcgatatcgatattctggttaacaactccggtggtccgccgcccgcaccggcgcaggggacggatggcgcagtctggcaacagcagttttcagtcatggtcgcctcgttgattcagctcaccgataaactcctgcccgccatgcgcagccgcggctggggacgcattattaccaccacttcatccggcgtgataacccccattcccggactcgccctgtcgaacgcgctgcgcatgagcctgctcggctggtcgaaaaccctcgccagcgaagtggctggcgacggcgtgacggtgaatgtgatggtgccagggcgcatcgcgaccgaccgcgtcagtcagctggatgctctcaaggcgcaacgggaaaacagcagtgcggaagcggtcgccgaaaagagtcgtcagagcattccggccgggcgctatggcgaaccgcaggagtacggcgccgtcgctgcgtttctggcaagccagcctgccggctacattaccggcgcggtgattcgggttgatgggggattgatcggcgcgatttagtcactgagaatgcgtcatgccggtcggtttcgcagtggaccggcatgactgcctatcagccgctccgaatggtttattttgcaggcaacgaaatccagttctgcaaatttaaccagcaggcattgggatcgggtctgaaaacgataacttttctgattaaacttttattcttcctgcgttgttaaagtggaatggttcaccataaataatgcgcaaagcgcgagcagtacggccccgccggtaagtagccacccggcgtggtgaaacgcggctaagctcccccgggtatgggcaaatctgacgtagcaggcggtcaccagcgccgcgcccgccatcgccccaacgcgctggaggatattcagaacaggtgcggcatcagccacgtgacggctgccagccatagccaggcccgcagccatcgcgggcaccgttgccagggctaaaccgaaccctctgaccgctattgcgccccccacaagcgtatagcgacttccctcatcaatcattgccagtggcaatgtggcaaatgccgcgagtaaaccgccaatgataagcaccgttcgtggccccagcttatcggagaagtagccggccatcggaaatcctatcgccgagccgattaactgaggggtgagaagcaggcccacttcagcaagcgttacatggcaaacgtcgcggaaatataaaggaagcaggaactgaccgccaaaattcaccgcgccgccgatagccatcaatacggcagataaagtgaagccccgatgcttgaaaagctcgagatgcagtaagggggactcaatgcgcaaagagcgataaataaacaagcaggtgaacagggcgcccacgctgagcatgatgacgttcctgccatatttaccactattcaggctgagctctttcatgccttccatcagcatcggcaggctgcaaaagaccagcgccagtcccagccagtccagagagaggggcctgtcagtttttattgtcggacggggaagcagcttccatccggcaagacaggcgcacagacagaacggcaccgtgatccaaaataaccctcgccatccgcagctttcaagcaggaccgcgcccagcgatgttcccagcaagggagcaatgacgatcgccacgccaatcgtgccaatcactcgccccagacgttcgcgtccgacgaccagaccaaggatcgtttgccctgccggtacgagtaatccccctgccaggccttgcataactcttgcggcaagcagcacctcaaaatgcggggaaagggcgcaaactgccgaaaaaatcgcaaataaaataaggccatagagccaaagctgcgtagcgccaaaccgcctggccgcccatgcgctcagcggaacgcctgccgcaagggccataagatacgccgttgctatccattgtattgccgtgtccgtcacgccaaggccggcggccatcgcgggcagcgccgcgctcagcatcgttgatgagagcatcgttgcaaacgcccccagggtgatgatggccgcctgcatccacagcatcggaggtatggcgtttatcggtcgcggatgggttgtttccttgacccgcttgtcttgattgatattcataaaaagccccctaaggacgatgtgcgaagaaatctatcattgattaataaacctatcaatgatagatttatttgcattaaagattccgccaggcgctgagttcagacaaaatggcgcttcacagaccactggccggtttgatgcatcaataaagggggaatatcatggcgaaaatccagcgagatcaggtgattgaggcagcattagcattattagatgaggtcggcctggaagcgatcacgacccgtaagctggcgcaaaaactgggggtggaatcagcgacgttgtactggcatttcaagaacaaggccagtttacttgaagaaatggcttccgcggttttagccaaacaccattccctgcctgtccccgaagatattgctgaatgggcaaactggctggcggataacgcccgtagtttccggcgcgctctgctcgcccatcgggacggcgccctgttacatgccgggacatcaccggcccgggtgggaggggatacgtttcgtcccaaggtggcgtatcttgcgcgcgtcggtttcactgaggccgacgccgcaatgatattactcactctgagtgaatacaccctgggatgcgtattagaggagcagtcccgctcgggcggtgatgataatcaaattttatcaaagccatcgccaggaattgcctctatcgaatcgctggtttatccccatccggatactgcgttcgaattcggtctgtcgttgataatgaaagggttattagtgccctgagcttaacgctgcgccggtgacaacatgatgtgcataccttacgcaaaaactatcttgataaaaccggcagcattcagaaggggaggcgacatgtttatttccgaaacagtgatagccgtcatcattgactggatcgacaataacttacataaaccactgcgtatagaacagatagcccgttattcagggtattccaaatggtacctgcagggtttgttcttgcaatatagaggcgagagcctcgggcgctatatccgtaataaaaaactggactcagcggcccgcgatttacgcgagaccgatgagaatatttacagtattggtttgcgctacggctatgactcgcagcaaacattcacccgattatttacgcgtcattttcatttgccgcccggtgaatatcgcaagaaaaacaaaacagcctgttacgtaccgggtaaggctgaatcttaatctcctttccgatagccctggcaaagccgccgcagaaaaatcgatgcgaagagatttatcaaaaaatagaaaaacagacggcgccgaaaagacaaaacctcctgttctttgtgtaaacatggggaacggcgcggaaaacgccgcgcctggtgagttatcaggaggttgctggtcagcagagcgattaatggtaggcgggaagccagctgccgtgtgcttcaataagatcgtcgcacagattgcggatgtcatcgatcgacagctctgcggaagtatgcgggtcgagcagggcggcatggtagatggcttcgcgtttgcgcgtcaccgccgcttcgatggtcaacagctgagtattgatgttggtccggttcagcgctgccagctgctccggcaaattgccgacgtagcacggcgtgacgccctggccatcgaccaggcaagggacttcgacgcaggcctcggaaggtaagttggtaatcaggccggtgttgagcacgttaccgccaattttgtaaggccgatcggtttccatcgcttcgatgatgtaagacgcgtattcatgggtacggctgtgggtcaggctggtgtcatgggtcagcgccactttctgctgctgccattggtcaatctgttcaatacaccggcgcggatattcatccagcgggatattgaagcgttcaatcagctccgggtagctgcgtttgatccagtaaggcatgtattcggcgttgtgctctgacgattcggtgacgtaatagccgaaagttttcatgatttcatggcgcaccatatcatcatgcttgccctgcagggcgctggcccggcgcttgatttccgggtacaaatcctcgccgtgacggcgaatgtccagcagccaggccatgtgattaatacccgcgatatgaaattgcacgtcgtcggttggcatatccacgcttttcaacagcgtttcagcacatacctgaacgctgtggcacagtcctaccgttttcacttccgtatggcgcagcatggcgcctgttatcgtggccatcgggttggtgtagttcagcagccaggcgtccgggcacacggcttcaatatcccgtgcgaaatcaaacagcacgggtagggtgcgcagcgcgcggaagataccgccaatgcccagggtatcggcaatagtctgctgcagaccatattttttcgcgatcgtgaaatcggtgatggtgcacggatcgtagccgccaacctgaatagcattcaccacgtaattggcgtttttcaacgccgcgcggcggttctcaacgccaaggtaagcggcgatcttcgctctgcccgcattggtattgcggttgatattattcaacatggcgagggattcattgagacgggcgctgtcgatgtcgtacagcgcaatctccacctctttcaacgccggcgtcgtcataatgtcgccgagtacgttcctggcgaaaatggtgctgcctgcgcccataaatgtcactttaatcatgctatttctccgttcctgctgttttcaccaggcagaatgtacgctgcggaatgaacaggaaatatggctaaatgtgatattggtatggcgaaaaatgatgtcgctatgaaagtgtgagccagctccgaatctggctgaaacgcggtgactttactgcaggcatctctgataacgtgggtgaaaaagagagagcgcgactgatgcacaagacttttacccttaatcataccgacaatatcgaattgaatttgtaccagtacggcgaggagaattgtcataagggacaccgctttggccccgcagtccgccagcattacctatttcattatgtgataagtggaaccggcacattttacagtgagtttggcgcttttcctgtcggcgccggggaggggtttctgattcatccccatgaggtgacaacctactgcgctgataatagggatccgtggcattatatgtggcttgaggtcgatggcctgattgccgccagaattttcgaggagtgtcatcttagtcggcaatctccggtttatcgccccaacctgaataaagacgactccagctcctctggctacctgcggcaaattgtcgaacatggcgatgaacatccgctgaaggtgcagggattgtgctatctcttcttttcttcgctaatcagcaatacgcccggcgaaaaggcttctctccctgatgataaaacccggcatctgcaaagggcgatcaaaaaaattgaaaatcgctaccacgaacatctgacggttgatagcctggccgcctattgcaatatcaatcgcagctacctctgccggttgttcaaaggcgcctacggtataggtcctaaggaatacttgctaaattttcgtatgaacatcgcagtaagcctgctgaaaaacagcgctacggcgattaaagtcgtgggtatttccgtaggctatgaaaatcagctgcatttttctaaagccttcaggaagctgtacggcgtatctccggctaaatggcggcaaaaatacctttctgaacagcaggcgctgagatgacgttcagcgcttattctcatcggcggtgactctgcgcgatcgctattttgcgggcgtatcctgattgagaatgcgcgatcgacaaacatccagaatttcatctgccagagaggagctatcaggacaggcgcgggaaaggaccagcgcgccgacaagatgcgcaatcgtatcgatcaggtcggcacgcgtaaggccttccgcggctttctcatttgctaaggtggccagctgagcttcaatgccagccgcaaaggttgccttaatggcttcagattgacgcgcggcgtcactacccagagccgacatcacacacccctttgccatgtcatcacgatgttggcgggagaggtaatactccacaaacgttttccggctcacatcggccgtacgttctgccgaacgcgtaaagccgcaatgcatcgcctccgataataaatcggccttggaaccaaagtgtttgtaaaaccctccgtgggttaagccagccgctgacatcagctccgctacgcctacgccgtcgtaaccgcgctcacgaaaaagttctgaagccgtttcaacgattcgcatcctgttttcgcgaacctgctcttttgacactttcatggcttacccccttcaaaacaaaggctaagtatacattgatgatgatcataatcaaaccagttgactttatagatgatgatcatcatcattaatcctgcgcatttacccgctacccagcagaggaagaaacatgacgaattcccccttatttcacccctacgaacctggaacgataacgcttgctaacctgaacaacatcttgagagcgtactcagaatgaacaataaacgtgtggctctggtgacaggcgcttcttcaggcatcggcgaagcgacggctcatcaacttttagcggcgggttataaggtttatggcaccagccggcgtggctctcaggcgggtacacaccgctttccgctgctgacgcttgatgtgactgacgatgcttcggtcggggccgctattgacgatctgctgcgcctggaggggcggatcgatattctggtcaataatgcgggctttggggtcgcgcctgccgccgcggaagaaagctctattgaacaggcctggagcattttcgataccaactttttgggcatcgtcaggctgacgcgggctgtgctccctcatatgcgccgtcagggcagcgggcgcatcatcaatatcggttcgattctcggggtcgtgccgttgccgtatgtcgcgctttatgcggccagcaagcatgcggtcgaagggtacacgggagcactcgaccatgaactgcgcacccagggcatcagggtttccgtgatcgaacctgcctacataaaaacgcagtttgaagccaataacagagaagcggatgcaaagctggaagagtatgaccttatccgggctaagctgacgaaagtggtcagtaaggcaatggccgaagcggaaagtccggaggttgtggctaaggtggtggttaaagcggcccaggctctacggcccaagatccgctacacggcaggatcgctggccggtaaattgaatttcattctccgattcgcgcctgcaaaaatcctggataaggtcgtgcgcaacagccttcagcttgatgcgagagagtcatcatgacattttcgcgactggccgcgtcaggcatcgtcgagcggcgtgaaggatatgctaacgggcaaattctgtttgccgtatttatcgagccgttactgggaaccgcttttttactcggcaatagcggcgccagaaaacatatcaggacaaataccaggaaaccagcaccatgaaagccttcacgtttaaacgctacggtaaatccccggcgctgggatttgatgacgtcgattatcccacccccgcggctgatgaacttctggttaaagtttacgccgttggcctgaatcccattgataacgtgattcctggcggcctgttcaaaccgattttgtcttttaaacttcccgcaacgctgggcagcgacttgtccggggtggttgtggcaacgggaagccgcgtgacgcgttttaagccaggcgatgaaatcttcgccagtattttcgacaggggaaccggttctcttgccgaatttgcgcgagtacctgaaaatctcgctgccatgaaacccgcaaacctggatttcgaacaggcagcgtcgctcccgatggtgagtctcaccgcctggcaggcgctgacagagagagccggactgcagccagggcagaaggtgttcatcccggcggggtccggaggaataggcagtttcgcgatccagctggcaaagcatcttggcgcaaaggtgggaacgaccacaagttcaggcaaccttgcgtgggtgagtcgtcttggcgcagatgaggtggttgactacaaaaagcagacgtttgaaaacgtgctgagcggctacgatattgtactcggcactctccggggagattcgattgaaaaagccgttaaaatactcaagcctggtggcaagattgtttccctcaccggaccattggatgccgcgttcgcccgtgaccgggggttaaatttctttttgcgttttatctttgcgctgatgagccgaaagatcctgcgtcttacacgagtgcggggtcttagctattcgtttttatttgtccgccccgatggcgagcaactcgcgcaaattagccaactcatcgaatccgggcagatcgggcctgcgatcgacaaggtgtttccctttgccgaaacaaaggaggcgctggactatcttgcccggggccatgctaagggaaaggtggtcgttagggtgtctgggtcataaccgcagcggttttccgcttcaacaaaaacactttcgtttaaatccgtcgtccttactctccatcgggagcgccctgaggacggccttagcccgctgagaaaagcgggcgtcacgccgtagcgttcacttccatcattgagataagctgtcataggtgagccgatgcttttgttggcaaaggattttgtctgatacaattttgctcggggagcatccgaatctggcccaacagcgtatgtcgcctgacgcggacgcttcgggcaggtgccgtcacctgtgaggatgatattgcgcgatcctgaaacaagtcgaaatcgtgacttaattctaaaatggtcacttgttgtcaatcaaggcgcatcacgctaagctgaaaaaatgactaagaatatgaacgttccatcatcacgcggcccgctcgatcacagcgtccgggagcaaatcgtcgacgctgcctttgagcatttcgggcattacggctatgaaaaaaccaccgtggcggagctggctaaatctatcggtttttcaaaatcttatatctataagttttttgaatccaaacaggctatcggcgaagtgatctgcgctaaccgcctggaaatgatcatggccgcagtactctcagcggtggctgacgcgccgtcagccagcgaaaaattacgccgtctcttccgggcgctgactgaagcggggagcgaactcttttttcacgatcgtaaactctacgatattgccgccgtcgcctcgcgggagaagtggccttcaacagaaaggtatgcggaacggctgttaaagctgattgagagcattcttgttgaaggcaggcaggccggggagttcgaaaggaaaaccccccttgatgaaaccacttatgcgatatacatggtgatgtgccccttcatcaatcctgttcaactgcagtttaatctcgaaacggccccaacggcggcggttcttctctcgtcgctgattttaagaagcctggccccctgatttgtgaccattgactttattggtcactagtctgagaatgcggaaaccatcctgttatttgattaagggtttcccatgctcaggcttcattcagcccgctttgccgcttgtcttctgccgttggccctcgtggcctgcggtgataacgcctcgagtgacgatccgcgcacccagccgccgctcgtcagatccgcatccgtagaactcgcgcacgatacctctcgcgcctataccggcgtggtggtggcaagaacgcaaagcgatcttggttttagagtgcagggtaagatccttgaacgctttgttgatactggccagaccgttaagcgcggtcagccgctgatgcggctggatcccgccgacctgaagctgcaggccgtggctcagcaacaggccgttgacgccgccagggcgcgggcgcgaaaagccatcagcgatgaggcgcgctaccgtggcctcgttggcgctggcgcagtctccgcctcggagtatgaccagatcaaagcggcggcagattccgcgaaagcggatctcagcgcagcccaagcgcaggcaaacgtggcgcaaaatgccacgggctatgccgtgctgctggcggactctgacggcgtggtgatggagacgcttgccgaacccggtcaggttgtcagtgccgggcaggcggtgatccggctggccagagcggggcagcgtgaggcgctggtacagctgccggagacgctgcgccctgccatcggcagcgaagcgctggcgacgcgctatggcgacgaaacgcagcccgtcgccgcaaaactgcgcctgctttccgatgccgccgatgccaccacccgtacctttgaggcgcggtacgtgctggaaggcccgttagccaacgcgccgctgggggcgaccgtaacgctgcacatcaaaaaacagagtggggaaagccaggtcatgcaggtaccgctggccgcgctttatgatgcgggcaagggaccgggcgtctggcggatctccgcgcagccagccagggtcgcatggcagcccgtcaaggtgctgagcgtgggcgaggaggcggcgcaggtaacgggcgaggtgaagcccggtgaggagatcgttgcgctaggggcgcatcttctgcacgagggcgaggctgtccgcctggccgggcaaccggatacggcccggacgggggataaaccatgagccagggccgctttaacctgtcagcgcttgcggtgcgcgagcgctcggtcacgctgtttttaattattctggtgactatcgccggtatttacgccttttttggcctcgggcgagcggaggatcccccctttacggttaagcaaatgacggttatcaccgtctggcccggcgcgaccgcgcaggagatgcaggatcaggtggctgagccgctggaaaaacgcctgcaggagctcaaatggtatgaccgcacggaaacctatacccggcccggcatggcctttatcacgctctcactccaggacaatacgccgccatcacaggtgcaggaagagttctaccaggcgcggaagaagcttggcgatgaaagcagaaacctccccgccggcgtgacggggccgatgataaatgatgaatttgccgacgtcactttcgccctgtttgcgctgaaagcgaaaggagaaccgcagcgcctgctggtccgcgatgccgaaacgttacgccagcagctcctgcacgtcccgggggtcaagaaagtcaatattatcggcgaacaggccgaacggatttatatctctttctcccatgagcgtctggctaccatggggctctcgccgcaggatattttcaatgcgctgaataaccagaacgcattaaccgcggcaggttcaattgaaacgcgcggcgcgcagatctttatccgcctcgatggcgctttcgatgaattgcagaagatccgcgatacgccatttattgctcagggtaaaacgctcaagctgtccgacgtggcaacggtagaacgcggttatgaagatccgcccactttgcagattcgtaatcaacatgaaccggcgctgctgctggggatcgtgatgcgtgaaggctggaatgggctggcgttgggtaaagcgctggatgccgaaacggcaaaaatcaatgccagtatgccgctggggatgaccctgacgaaagtcaccgatcagtccgtgaatatcagcgccgcagtcgatgagtttatgatcaaattcttcgtcgccctgctcgtggtgatggtggtctgttttgtcagcatggggtggcgcgtgggggtcgtggtcgcggcggcggttcccctgacgctggcggttgtttttgtggtgatggaggccgccggtatcaactttgaccgcgtgacgctgggctccctgattcttgcgctgggcttactggttgacgacgcgataatcgccatcgaaatgatggtggtgaaaatggaggagggctacgacagaatcaaagcttccgcctacgcctggagccataccgccgcgcccatgctggccggtaccctggtcacggctatcggctttatgccgaatggtttcgcccagtccaccgccggggaatacaccagcaatatgttctggattgttggcctcgccctgattgcctcatggctggtcgccgttgttttcaccccttatctgggggtgaaaatgctgccggatatcgcaaaggtagaaggggggcataccgccatctatgacacgccgcgctataaccgctttcgccgcctgctgacccgcgttatcgccaggaaatggctcgtggccggttccgtcatcgcgcttttcgcgctggcggtcatggggatggggctggtaaaaaaacagtttttccccacctctgaccgcccggaagtgctcgttgaagtgcagatgccctatggcacctcgattgagcagaccagcgcggcaacggtcaaaatagaggactggttggaaaaacagccggaagccaggatagttaccgcctacattggccagggttcaccgcgtttttacctggcgatggcccccgaacttcccgacccgtcgtttgccaaaatagtgatattgacggacagccaggcatcacgcgatgcgctcaaattgcggctgcggcaagccgtagccagcggactggcgcctgaagcacgcgttcgcgtgacgcagctggtgtttggcccgtattcccctttcccggtcgcctggcgagtgatggggccggataccgatacactgcgcgacatcgcggaccgggttaagggcgtgctgcaggcaagcccgatgatgaggaccgtcaacaccgactggggatcgcgcgtgccgacactgcatttcaccctcgatcaggaccgtctacaggcaaccggcttaacgtccaatgccgttgctcagcagctccagttcctgctatcgggcattcccatcaccgccgtgcgggaagatattcgctcggtgcaggtgacggggcgcgccgcgggggatatacgtctggatccggccaaaattgaagggtttagcctggtcggcaatgcgggccagcgcatcccgctcgcgcaaatcgggaaggtggaggtcagaatggaagatcctttactgcgtcgccgcgacagaacgcccacgattaccgtgcggggggatattgccgataatcttcagccgccggacgtttccgcctccatcatgaaacagctgcagccgattgtggactcgcttccgccggggtaccgcatcgaaatggcgggttcaattgaggaatcggctaaagccacccgggcgatggcgccgctgttccccatcatgatcgccctgacgctgctgatcatcattgtgcaggtgcgctcaatgtcggccatggttatggtatttctaaccgctccgctcgggcttgtcggcgtggttcccgcgctgctgcttttcaatcagccatttggtatcaacgccctcgtcgggctgatcgcgctttcgggcattctgatgcgtaatacgctgattcttatcgggcagattcaccataatgagaaagaaggtctcgatccgtaccattcggtcatcgaagcgacggtgcagagagccaggcccgtcttactgacggccatggccgccgttctggcgttcattcctctgacccattcggtgttctgggggacgctcgcctataccctgattggcgggacgttggggggaaccgtcatgacgctggtgttcttgcccgccatgtatgcgatctggttcaggatccgtcctgaagcccggcgccatgctgaacaacattaaggcgctcgtctgcctgctcaacgaacgcctggcgtgaccgtccgaaagcagagaaaagcgccgcagtccgcggcgcttttcatcacgcctgaatatagcgatgaatattgggccccatggtgtattgttcggctgtcagattgggaaaaccgggagtttttgaatattcgggttatcccggttcttttttattaaagaaaagcgtaaatcatcagtagccagagtatggctccaacggcaataatcattttcaggatgaagttactggctgggaaaaaatacaccgccggcagtgcggaacgcctggccttaataagtaaataaggcggcaataatatactccacagcaccagcgagatgccggcaaaggccagggcagacaaaaatccttgcggggcaaaaatagaggctagcgcggcaggaaaataggtcaaaaatatggccagcgggcgtgagccccggcggttaattttgttcagcatatcctcgagataatcactcaaaccgattgaggctaacatcagtgaggctaaaacggcaatacatccaaaagagtccagcatccgtaggcggcctgccgaagcaggccggcagcagctatttatttcgtggcttcagccaatgattctctgaagtttttatggaagtcgtcgatttgcccgctctcgtggagcgccgacaatgcgcagcgcagaatggcgtgcccttcttcaacggttggatacatcgccacggtcgtcgcgaagccgcgatcgtgcagttttttgcacatcgtgatggcgagatcttcgttaccaatcaggatcccccgaatcggcatcgtcgtaccccggttaacgatgtcgatcttgccgaaaacttcgtcaaaatagcgaatgacgttctgaagcttctcctggcgggcagcgacggtgccgtccaggtggagatcggcggcggctacgcaggcggcaattccaggcaatgaaggcggcccaccaaaggcgtaggttgtgccgtaggtcttaataaatttgatggtctcagcgtcgcgacaggcgataaatccgccgtgtgagccaaaggctttagatagcgagccggcgataataatacgttcgtcaagccgatggccgaggcatgacataacgtatccggaaccgtactctccgtagatagaggtgccgtgcgcatcgtctatatacgcgtagccgtcatactgatgcgccaggcggacaatatgcgcgacgggggcgacgccgcccattgagcctacgctgtctgataccgagatcggcgttaatccctggctggccgcatagcgaaaagcctcttcaatccgcgccttatcctgaaaatcaattctgacgacttccccaaactgctgtaaaagcccgcggttgatctgcaacgtcgcgtgcgcggtcttctccataataaaatagggttttttgctgaacgtaaaatgcggcagcgtcccggatgccagcagcggcagcactgcgatatggcaaggggtcacggcgttaaacgtcagagtatgagccccatgcatgatgtcgttcagtcgtgcttccagctgcgggaacagatcgacttttacccgcgttctggcgacagaaacctgcacgccaaaacgctcaatggcgtcgacaaccgcttttttcagcgccgggtgagtctctagcccaagataagagcatgagacaaattccaccatttttctaccatcgtcgagggtaatgaccttgccgtccctttttaccgcgaccagttcattaatatgttcagagaatacccgggtctgatattttagcgacctgtctattttccttttttgccagttttccattgcgttaccttcattgtcgtgactaccagaagagacagaattgccagcgttaacgtgctggcaccgagggttctgtcaaaccccataccggtatccgttagttttacggcgaaatagctgatggcgccggcgctcaccgtttgaataaatccggtgacggacgccgcaatacctgttttgctgcctttgatttgcagcgcgataaaattcgcgctcgggtaataggcgccaagggtgaggttaaaaatcatcgagccggtgatacataatagtagtgagtggctgccgataataaatggggtaaccgccagcgcattcaggagaaataaaatccacgggttaattattcgctcgaatttggcgatctgattgccaataataaaaaataatacggaagcagaaaagagcagcgagtagtgcatggtgcttagccccagctgctgcataaaaatggccggcgacagcgagatatagcaaaacagcgaactcagaatcagcgaaaccagcagcgttccctgaataaatgccggggtgataaacccggaagaggagggcgccgcggccgcatcatgctgctcaaggcgacgcggagagagcacaagggtgacgacgctaaacagggccatgaccaggaatatcgaattccagctcagatagccgaggagcgcggcgccggccagcggcgcaataagaggaaccaccgcgctggcggaagaaatatcggaaagcgcgcgcttgagcgttagcggggagaacgtctctttagcgatagctttagacaggaccggcccggcgccggcgccaagggcctgtaatgccctgccggccaacagcatcattaaactatcggacataaaacagaggaggctgcccgcgaggaaaagcaaaaagctggccgtcagtacgcgtaatttacccagcttttcgccaagaaatcctgataataactggctcgccgcgtatatcaccagaaaaccactaatggttaactgaatagccgaataatcggtagtaaacgctttttgtaataggggcagcgcgggcacgatcatatctgtcgccagcgcggaaaccgatgcggcgagaataaggtataagtatatcctgagcatattaaactcttcggtgaatatgggttaaaacgttagattattatttatgaatacgccgctgcttttttagcgaatgagcaaatcgcgattccggtcaaaattaatagcgagctcagtaaatgatagagatgcggctgggtatgtaaaaacacaatgcttaatatgccgccggaaagtggaataatatgggtataaatctcaccgcgagtcgcgccaatagccgcgatgcctttattccagaacaggtaggccagccacgaggggaaaatcaccagatacgccagtccagtaaggaaagcgatatcgtggtaggcggcgaatgaggtggcggggtgcagccacagccagaaaatcaccaccggaagcagaataagggcgccaagaagcgaactgacggcgacgaaagcattggcggggatacgacgatctttgttacgcaacagcgagcagtatactgcccagcttagcgccgagcccattgcccacagatcgccctggctaaacccttttagcccctctgcgttgctcaggttgccatgcagcaggagcagcagcacccctgcggtactaaagatcacgccccaccagttccgcgccgatacccggtcatggaaaatcaggcgattaatcatcagcaccatacagggggtcgcagacatgtaaatcgctgcgttcagcgcagacgtcgactgcagaccaatatagagggttaagggaaagctcacctgtccacacagcgttagaaccagcagcgttgcgccattctggcggaacaacggccgactgtcgcggatttgccgctgatacagcaataccagcagtagtgcggtcaacgcccatctcgcttcggtcatgagaatcggatccgcgccctgaacgagaatatgccctacgacataattccctccccaaaacagggccgccagcgtgagtaacaggtaaggcatgctcattccttgcatcgcttcgaactgtactaaatggtaactttattttttttaatatatcaattaaattttatggttattgggcggttttattatttttttattttaaatcatatgtttaaaaattagttacctgtgtgcaaaaaatctgattgcagcatatttgtctgtacgataacgtatatataccatgcattaaacagggataaatcaatgcgtaagacagaaaatggtttcaccgggaacgaacaacattccgcaatggccaggctctctctggatgacatgattgaccagcttcttcacagcaacgcgctttcactgaaactgacggccaatccgctactggcggacagagcctggtacctgaccgaaaatacctgtactaaggcttttaccgccaacgatccgcaagcgaaaaaacgtgcccacagcgcgctgtttaaactctaccaggcgtggctggcggagccgctatcggcggcggcaaaaaaccagtttcatccattactctgcgggatcagaagctacatcgaatcagaatggctccgggtggaaaaaaaacgtttcagtttcccgatacccgcgcttgacgccgggaatatcgttgaggaactccgtcatttatgtcagaaacatccggcttcgcaccatcccctctttgattttctctcctcttccgcctctgctacgcaaatagactatttcttcaaaagcgatagcgcgctcaatctgctgtttttcgatctggtcgcgatggggctggtcggctctctgccagaaacgcgtgcagagattgcccagaacctttgggatgaaataggccagggcagccaggagtttacgcacgttaatctgtataaggatttgctgaagcgcagagatattgcgctgcctgaaaaccatttcgcccatctgtatgactggcaggggctcgccgggtataacgcgttcatgctgggcggcgttaaccgtcagcattactacaaatcgctcggcgtgatggcgatgacggaactgctggacccgccgcagtaccagaagctcgtgaccgggtgccgtcgcattggccttacggatcgcgacgtgcattattacgcggaacatatcgaggttgatatcggtcacgccgatgggtggctgaataacgttatcgttccgatcggcaataaaaacccggctgcgctggaggaggtctacgttggcgcagcgctgcgtcttcagacctgctgcgattactacgattgtctgctggaggcgttacgtaccgttgttgaacgcgagtcagagggtgccgccctctgaataaataagcgcttttgccgcgctccaggccgttattccgggagggatctcccggcattccgaggactccgcctgctgagcggcaatggcgccgtcaatcagcatgagcatcatcatcgccacccgttccgcaggttccggttttaacagcagggtaagaatgtcgcggaaaaactggtagaggcgcgatttaaaccgtgagcatgtcgcccggatagcggaagacgaggttccatattcaaacagggcgcgggtgaacatgcagccgtggaaatcctcacaggtgaaccagttattgtaatattcgaagacggcaaacagcttctcgcggcctgaaggtttatcggcggtaatctcctgcagcgcctgcataaactcactctctttctgctgtaaaatatcaagaatgagcgcctctttatccgcatagtagcggtagaaggtcattttggagatgcccgcattctccgatatccggtcaatactcggcgactgatacccctctttgttaaacagagacattgactggcggataatttccgcttgttttggcttcatactgtttcccgtggaatgaagtaatacagagggtttctggtagcgagcagtcattcatttgatatggcgggcggcacgctgcaacgacgtatgcgcaatgtcatcccgatggccgatatcccagcccctgcggtgagcggcatcagtgaacgcgttgacccataaaaattgttgtcgattcttacatccggctgcaaaaaaagcaaaaatccctcaggcgatctttgcgctgcgcgaatcagggctgcgctgggccgccacgttatgcccttagccctccacgctgcgcgcggggaggataaagagaggcccgggagaagtcagcatcccccccgaacagggggtgatgtttttgtgatgcacatcataaaataacgcctggttattgtgatgttatttgcagtcaatggatttgcatttgaatcaacccgcgctatctctgcgggttttttttcgtccggcgatggtcggcgggcggcgactccgcctgctgtaaatagtcctgataccagccgctgatacgtcgggtcaccggattttcgttgaggtcgaagcgcctgccgtcgagcctgtttaccggggtaatacctgccagcgttccggtgacaaaagcttcgtccgcagtgaaggcttcggcaagggtaaaggatctttcctgcacgccgaggccctgctggcgcgccagtgacaagatcgtgtggcgggtaataccgttaaagcagtacaggccgtttgaggtccacagctcgccctggcgtacgataaaaaagttggtggaattgcagctggcgacaaacccatgagggtccagcatcagcgcttcatctgcgccggcgtccagcgcctgcaatagcgcctggatcaaattcaggcggctgtgggaattaagacgcaaatcgaaaacatccggcgcgctggtacgataggtcgaggtgagcagggcaaggccgcgccgtttggcctgttcatccacaaccttatattccgccacgcagacgatagtggcgccgccgaggataaagcgcgggtcctgatttggcgtgcgctttttgccgcgggtgatcatgagccgcagatgggcgccgtccgtcataccgttgatcttcagcgtgctgtacataatatcggttagctcctcacgactatggccgatattgagctggatagcggccgccccggcaaacaggcgatcgagatgcgcctgaagggcgatcagcttgccgttcaccagccgcagcccctcccagaccccgtcgccgcagacgtagccggaatcgaaaacggaaaccgtggcgcgatcgcggtgaacgaattcgccgttgacgtacacctgcacattgtcgttgcgcgtatcctgcaggtacgcctgactgctttgagcggagagagctaaactcatcatgtttccttgcggttaaaatgcccgttcagcgaaacgggaaaggaaggcctgggtgcgcggttggcgcggatggcgcagcacctcttccggggtgcccatttcatgaatcacgccgttttcgataaaaatcacccgatcggcgaaatgccaggcaaagcccagctcatgagtgaccagcagcagcgtccgcccctcatctgccagttcacggatggtatgcagcacttcccccacgagttcagggtcgagggacgaggtgggctcatcgaacaatattatctctggcgccattgccagggcgcgagcaatagcgacgcgctgctgttgaccgccggacaggctgccgggccaggcctggtgcttatggccgagccccactttttccaactgcgcgtgggcaatgcgcatcgcctcttcgcgacgcatctttttcaccgatatcagggcttcgctgacattttgcagcaccgtgagatgcgggaagagattaaattgctgaaacaccatccccacgcgctggcgaacatcgctcagctgtttttcgctatagcgccgctgaccgcggctgtcgattttaccgagggtaacgccgtccagttctacggtgccagcgctgggtatttccataaagttcagacagcgcagcagggtgctcttacccgagccgctgccgccaatgatggcgattttctcaccggcatagatatctaaatcgatgccctgtaacacgctttgcgcaccaaagcgtttgtgcagggcgcgtatccgcatgacgacttttttctctgacatggcctttctcatcatattaaggatgtggacggtagcggcgctccagacgtgccgccaggtaacttccgggccagatcagcacaaaatagagcagggcgacgacggtgaaaatctccaccggacgataccaggtactgcttagcagcctgccctgatacatcagttcgttaaccgtgagaatcgaggccagggaggtcaccttcgccagttcaatcatgcggtttgtcagggctggcaacatacggcgaaatacctgcggcaggataatacgccgcagcatcacgcccggcggcatgcctaaggcttttgccccttcccactgcccgcgttcgatggactgtagcccggcgcgaaaaatctcggtgctgtaggcggcggtgtacagggttaacgccagcgcggcggcgccaaaagtggaaaactgaatgcccaccagcaccggaaaggcatagtagaaccagatgagctggataagcaccggcgtattgcggaacacctcgacaaaggcgctggtaaggggataaaaatagcgcggcccgcgggcacggacgacgccaacggcaagcccgatcagcgtgccgacaattcccgccagcagccatagctccagcgtaacgcccagtcccttcaacagtaccggcaagttttgccagacaagggaaaagtcccactgataatgcatggttgttctctcgttaacgtgagtcggagacggcaaggcgtcgttcaagcagctggctgccctggctgataatcagcagcagagtgaagtacatcaccgcaataagcgaatacacttccaggggccggtaagtctgactgttgatttgcatcgcctgatacagcagctcgctgtacgccagagacgaagcaagggcggtggatttgagcagttcgaaagaacgctcaaggaaaggaggaatcattctgcgcagcgcctgagggaaaatgacccggcggagcgcggtggcgcgcgacatgcccaacgccttcgcgccttcccattgtccgtcgccgatcgactggatgccgccgcggtaaacttcggcataaaacgcggccgactgggaggagagcgccagtaccgcggcagcaaacggcgagagcgtcagcgggctgacgactggcagagcgtagtagatccagaagaagtggacgatagcgggagtattacgataaaagccgatcagtatcagcgccggaagacggaagagcattagcggcgaggccttcatcaacgccagcgcaatgccggccagcatgccgaataaaatactggtgacgccgatctgaatggtaccccacagcccctccagcaacagcatgcgatatggccagatggcggcaaaatcccattgatacgacatagttctggaacccctgaaaaacgcaaaacgatggtgatggttttagaacgacatcatcttagcagtagcgaaatgtgataattaaataataaaaaccattgctattatctcttttggttataaatatttacgcgagaaagcaatgccagactctgattccttaaccgctacgctggcgcgttttgccggcgaactcaccccggctgcgataccggcgtcggtgaaagccaggatcgctctgcattttatcgatagcctgggctgcggcgttgccggctgcgaagacagcgtgctgcggaaaagcacgcgggttattcgtagccagtacgcgaccggcagaagcgcggtgctcgacggtggaactccgctctccgccagcggcgccgcgttcctcaacgccgctgcgataaacgcgctggattatgacgatggttttgaagtcgccgggcgggggatggggcatcccggcgccacgctggtggccggggcgctggctgcggtgggccagggcgggctggtcagcggcggggcgttgctgacctctctggtggcggcctgggaaatcaatagccgcgtgattatctctcagcagccgagtcctgaacggtttcaacaagtgtacggcgtgtgccagcacgaatcgctgggggcggcggtggcgtatggtttactgcgcggctgcgatgccgcggggctggaaaatagcctgggactggccgcctcgttaacccctttgcccacgttgcataaatacaactggcaggcgcgtccactggtttcgtttaaggattacaacgcgccggcggcagaggccggcgtacgcgcggtggagctacacctcgcggggatagtggggccgcgcgagatactcgatggtgaacaggggttctggcggatgtcaggctccgaccgttttcagccagaacggctgacggagcatctggcgacgcactggcagctcaggcacgccagtttcaaagactatccggtatgccgctggatgcataccgcgctggcgtcgtttgagcgtctgctggaccgtattccgtcgccagagtcgattgagcggattcgcgtttacggtagttttaccctggcccgttttttcgccgacgcgcgtcccgtcagcaataccgatgcgcagttcagtctgccgctggcgatagcctgcctggcgtttaaaatcgcgcgtcaccagtggagcagcgatcggacgcgcggcgcggcgccactccttgccttcgctgaccgggttgaaatcatcgccgatgagacctttgaacagctgatgctgcagcatcgccgtcccgccgcgcgcgtggacattgtggtaaagggaaggacgatcgccggagagcgtatcgacttcccgccggggtgtgcagaaaatccgctgccggaacagcggatcgtggataaatgcgtggccaacctatcatcacgcctcagcgcgccgcgggcagcgcggctgattgacgctctgctggatatggaacgctgcgcggacattggcgcggcaatctcgccgcttctgtccgcgccaggagagtagtcgcttatttccactcttctttaatcaccgagggcactttgctgatatccacaccgcgtagcttaagggcgtcttcataaaactgtttgctctgtcccgactggtaaattttggcaaactcttcattcagaaagttgcggaagcggggatcgctctctttgcgcagcgcgccgccggtgctgatggcaataatcggttttggcagaatcaggttgcctttgtgcacttttgcctgctgcagagccagcgccgggtgaacgtacgagagggcgtcgacgcgtccggcgtagaaggctgcgacgccttcatccatattggtaaagcgcaccagctgcactttgggtaattttttggtcagtatcaggtccgggctgctgccgagcgtgacgccaatcttaatatccgggcgattgagatcttcccagctctcggccttcacgccgtcgcggatcaggaccccctgcgcataccagaggaagggctggtcggaaaagtcggcggctttgcggcgttcatcggtggggtccagcaccagcatggtatcaatctggccggcctgcagcgcggcgaccgcatttccccaggtggtctccaccggcaccagttttacgcctaaatcttttgccagtactttacccacgttatagccaatgccgttccactgaccggtggctggatctttgaaataccacggttccccctgcgcgacgccgacgcgcagttcgcccgattgcttaatatgatcccaggtggactcttcggcatggctgaaaaaaggcgcggcggcgatcgccagcgacaacagcaatttatgaatttttgttggcatatttttaccctgatgagaaagtcatttctgaaaaacaacgtattacgcgaacacgataacggagtttgttatcagtgcattattattttttggtttaactcatgcccgaatgttatttgctgatacctaaccggtttcgcttaaattacggcgcgttgcacatattattcataacttaatgcgctattgttctaaggtgctttatttccgtcgccgaatttaaaaattccgatctggtgggagtcatagtttgctgggacgttaaaaatatcacttctgacagccaggcttataaaagagcgacaataattgccagacgagcgcgtccccggcctgaaaatgatatcgccgcgtccctcacgcagcgtcaggcgctagagtgcagaagataaaagcggctctaccgggtaaatttccctatccacgggctgcttgtatcctgtgaccagagttgtaatagcatctccctgaacttttccgctgcagggctcagcgccgtttctctgcgcagcacgagaccgagcgtgcggcgaataaccggctcaacgagcggacggctgacaagaatgtgatgctcatcggtcggcatggccagactgggaaccaccgccacgccaagccctgcctctaccatacccagcgacgtcgacagatgcctgacttcatagaaccagttgggcttccagtccatattctccagcgcttgatcgatcagcgagcggttaccgcttgaacgtctaacgccaataagcctgaagctggccaggtcttcccacaagatcagcgatttctgcgccagttcgtggtctcgtcggcaggctaatacgaaaggttcattgaccagcggcgagaaatcgatattgggatgtgtgatgtttatcatgtttatgccgaaatctgcgtcaccgtttaagacggcttcaagacaatcgctggcgctatgctcgaggatgcggatacggatattggggtagtgattgttatagtccctgatgaccgaagggaggaaatagaacgccgcggtggggaggcaggacagggtgacaacgccgctttgatgggtggccatttctttaatactcaggatcgagctttcataaaaatctattaaattctttgccttaggtaaaaactctctgcctacagccgtgagtttaatgtttctggttgtccgttcaaatagcgtagctcccagctgctcttcaagttttttaatccggcgggttaacgccggttgggatgtgtgaagaaaatgtgatgctcttgtgaaacatccaatttctgcaattttaacaaacgcttgtataccttgaagatcgtgcagcatgagatttcactccagactttatcgcgatgcaaacacactaacctaaccgctatttatacgcaaagcgtattaatcgatggttttattggcattagaattatgtattcgtctgtggaatcctgacattgctcttatcaatgcgtgaaacgagaaacataatgttaaagattccttgtgtactgatgcgtggcggtacttcgaaaggcccggtgcttctggccagtgatttaccgacaaaaattgaagaacgcgatgctgtgctgctgggcttaatgggcgcgggtcacgaacttgaaattgatggtattggcggcggcagcccccaaaccagtaaagtcgcgattgttagcccctcggacagtccggatgctgacgtcgactatttatttgttcaggtgatggtcaacgagcgccgcgtcgataccacgcctaactgcggtaatatgctctgtgccgtagggcccttcgcgattgaaaaaggcctggttaaggcgcaaagtccggtgacgacagtgcgaatccgcaacctgaataccggtacgctggttgatgcggaagtacaaacgccgaatttttatgtcaactatgaaggcgatacgcacattgatggcgttcccggctgcgctgcgccgattggcctgactttccttaactccgccggatgcaagacgggaaagctgctgccaaccggtaacgtcgttgatgtgattgatagtgtggaagtcacctgtattgatatggcgatgccgatggtgctgattagggcagagcggatgggcaaaacgggagacgaatcaccggccgacctcgatgccgatcgcgcgtttatgaataagctggaaacgatccggcgcaaggcaggtgcgaaaatggggctgggcgatgtcgccgataaagtgatccctaaaccggttctgctgagcgcgcccggcgcaggcgggaccatcagagttcgttattttatgcctcatacttgccataaatcactggctattacgggctctatcggcatatccacggccacgataattgaaggatcggtggcccatcacattgtggccgaccagccgaggacgccgtataccaatattattaatattgaacatcctagcggaaaaatttccgtatctttactcaaagagggagatgatattgagaaaacgcgtgccgcagtgattagaacctcccgtaaattatttgaaggcacggtttgcgtcccggaatatgttttagtggaggaattataaatattttatatcattaatgcggtgcaatactgatgtcctctcgcgtgtagttgctacataactctgtacctaaaaaaataatgtcgaggattttatggctataacccatacgaaagataatcagcttaattctgctcccgtcaaggtcagtaattatattcggatcatcctggccctggcgctatccggccttgcagaattagcctcactcttttttattcaacctctgttacccgttctcgccgtcgaatatgatgtgccggtgagtcaggtgagtatcattctctccgcagaaacggcgcttctggctatcggattattattcaccgggacgctgtccgatcattacggcaggaaaaaattaattatcgtttcgctgctacttggcggactgctgacgatgctctgtcctctggtcgaatcatgggcgatgctggtggccctgcgtgcggttattggcctggcgctcagcggtatcgctgctgccgcaaccgcctatatcagcgaggaggtcgcgccggtggtggcgggggtggtcaccggatacttcgtctttggtaactcgatgggagggatgtccgggcgtattgtggccagccagctgatcgaccatatctcaataaataccattttctatggttttgcgatcagcctgattttggtggctttgttggtttactttttactcccggcgtctcagaactttaagccaacgcaaaacctcaacgttcttcgcgtggtgaaaggcgcggcatctcactttaaaaataaaaagctggcgttagccttcgtgattagcttcatcatctttggggtattcacctctctctataactacctggctttcttcctgaaaggcgaaccctttcatatttctccggcgaatgcgggcctgctctcctttagctttgccttaagcttttttaccgcccctcaggcgggacgactttccgcaaaatacggcagtatgagagtcctgcgcgcgctgtttgtaatgatggcgctgggaatgctgctgactttaacgtctaacgtcgtcacctttattatcggcgcggtcatttttaccggttgtttctttggttgtcactccattggcttaagctgggtaagtaaaaatgcaacgcatgcacgtggccaggccgtcgcgctgtatctgttcttctactacatgggcggctcagtgattggtttcgtgaacggctttgttttccactctatgggctggcaggggatgacgggattcattattgcgctactggccgtgggggcggtggttgcaacgtatttgtcttccagcgaaacaaaagtcatggttccggttgagtcttaaacccttcgtggcgaagtgaatgactcacgtcatctccagtggcgtgagtaaagaaattcaatgttagtaaggtgtcatcatgaaattagcaagctatgttcatcatggtcgtaagagttatggaatattgacggatacaggcattattgacctgggtggcaagattggtcatcaatatcgtacgctgaaggacttactgcagtggggcgctattgagatcgccggccaatatgttaattatccggtcgatgtcatgatggctgatattacttttttaccggtcattgaaaatccagggaaaattttctgcgtcggtatgaactatgcggaaaaaagaaaagagttttctgaaaccagcgatgcgccgaccctctttattcgttttcctgactcgcaaaccggtcatgcaacaccgatattaaaacccgcgctatccaatgaatttgattatgaaggtgagctggccgttattattggcaaaccgggtatgaatatcgatactggcgctgccctgagccatgttgcaggctatagctgctatatggatggatcggtgcgcgactggcagcatgcctggtttaccgccgggaaaaactggcggcagaccggcgcgtttggtccctgcctgacaaccgttgatgaaatacccgatccccaccgcttgtctattcaaacctatttgaacggcattatggttcagaatgattcgacgagcagtatgatccataaagttgccgatctgattagctatatcagtacttttacggcgctcagcgccggcgatgtcattattaccggctctcctggcggcgtcggtaaaaaaagaacgcccccactctttatgcacgaaggcgatcgggtcgaggtggtaattgaaaatattgggcatctcatgaatacgattgtcgaatcaaaaccgcagcacgaattgcagatgtcgtcgtctccgcgggctcagacaagattatttgacgctcattaaggtatgggcaggagaaacaagatgtacaccgaccaaacgctagaattcgagaaagtggaaactagcaacggtaccttcagagacgaaattattctctttctgaagaacaatggattaggcatcgacggcgacattgagcaatttgttgtcgcgcgctgccagcggcagctggttgcctgcgccgggcttgcggggaatacgttaaaatgcattgcggttgccagagagtggcgcgggacggcgttaggcctgaaaatcattcatgaagcggagctgcaggctgttcagaacggcgaacatcagctttttctcctgacgtgtccggacaatgtgcggtcgttccagggatgcggattttatcctttggtcaccctcgataacagggcgacgctgatggagaattcgccggttggcatccatcgctactgccgccaactgcggggccagcatttggtgacggccggaaatatcggcgggattgtgatgaatgcaaatccctttacgttagggcaccagtatctgattgagcaggctgcaaaagcgtgcgactggctgcatgtctttgtcgttgaggaagatctgtccacgttttcctttcggcaacggtttgccatggttcaggaggggtcacggcatctgcctaatattacggtccatcctggctcaaaatatattatttctcgaggaacattccccggttactttctcaaagaaaaacaaattattaacgaggtgtatgccgcaatcgatttgcttatgttccgccgttacattgcaccggctttaaatattaatcagcgttttgttggtactgaacccttctgtaaggtgaccgcgcaatataatgacgcaatgcatcactggctggaggatgagatgacaatacctgccgccagtatcaaggtgaatgagattcagcggatgaccgatatgaataatcttcccatctccgcctctgcggtcaggaaattgttaagtcacgaagatatgcacaccgttaaaagtatggtgcctgcaactacgatgccctatttatataaatggttatcagcgaatcaatctaagcagcccgatttggatatggttgatgcttaataaatcattgttcaggatatttatatgaaaatattacatgcggcaatcgccgggacgctggaatccagcgacctggttgtcaaagtcagcccctacgatgatgggctcgatattactatcaacagcgaagtgtacaaacaatttggtgaacagattacggcagtggttaatgaaacactttccgcattaaacgttacgcaggggcaaattattgttgaggataagggcgcgctggactgcgttatccgcgccagaatgcaggcggcgattttacggggaacggccagcaacgaaattgcgtgggaaaaattatgatgaaaaaattacgccgtagcatgctttttttaccgggttcaagcgccgctatgctttcaacagcctttatttataaacccgattcaatcatgtttgacctggaagatgcggtctcgttgaaagagaaagacagcgcgcggctgctggtgttccatgcgctacagcatcctatgtataaagatattgaaaccgttgtcaggattaatccgctgaatacgccatttggcttaaaagacctggaagcggcggtgcgcgccggcgtcgatgttatccgtttacccaaaaccgatacgccggaagatatttaccagcttgagcgtgaaattgtgcgtattgaagagagctgcggccgcccggtgggctctacgcagctgatggcggcgattgaatcggcggtgggggtcattaatgccgtcgctatcgccaggtcctctcaacgcctgatggggattgcgctggcggcgtttgattacgtcatggatatgcaaacggaacgcggcgacggtaccgagctgttttacgcgcgctgcgcggtattacatgcggcccgcggggcaggtattgatgcgtttgacgtggtctatgccgatattaatgacgaggccggctttttgaaagaagtggatttgattaaacgtatgggctttaacggtaagtcgcttattaatccgcggcagatagagatcttacataatgcctatgcccccactcaggaagaagttgattacgcggagcgtgttattgccgcggccgaagaaggggagcgtagcggacttggggtgatttcactgaacggcaaaatgattgacgcgccgatcatcaaccatgcccgggtggttattgaacgtaaaaatgcctccggcatccggcaataatctccattcagtcaccagcaacaggatttaactatgaatcaattaaccgaagcccttcataatatatccggcgcccagcaccagtatgaggtattttccggcgcaaatacccatacgccctatcttgcggatacccggcaaaaatatcagcgcaaactttttgacacgctggatgaagttttatcgcgctgcgatttacgcgatgggatgaccgtttcatttcatcacgccttccgcgagggtgatcaagtgattaactacgttatggccaggctggcggaaaaaggcctgcgagggctgacgctggcgtcaagttccctgatgacctgcaacgcgccgctgatcgagcatattaaacacggcgttattagcaaaatctatacctccgggatgcgcggtgaattagcggatgcgatttcacacggcctgatggaggagccggtacagatccactcgcacggcggcagggtcaatctgattgaaaagggtgaaattaatattgatgtcgcgttcctggcggtctcctgctgcgacgaatatggcaatgccagcggcagcggcggcaaatcccgatgcggctcgcttggctacgcgatggtcgatgcaaaatatgcccgcaaggtggttttgctgacggaaagcattgagccgtttccgtatatgccggccagcattattcaggatcaggttgattatattgtcaaaatcgacagcgtaggcgacccggcgaaaatcagcgttggcgccgcgcgcgtgaccagcaatccgcgagagctgatgatcgcgcggtctgctgcggacgtcattgagcattccggttattttcgcgatggtttttctctgcaaacgggatcgggcgcggcgtccaccgcctgtacgcgattcctggaatcccgcatgaggaaacacaatatcgtcgccagctttgccttaggcggcattaccggcagtattgtcgatctgcatgaaaaggggctgattactaagctgctggatacacaaagttttgatggcgcggcgggggagtcgctggcgaaaaatccgcaccacgttgaaatctcgaccagcgtttacgccaacccggcggcgaaagccgcctgctgcgaccgcgtggatatcgttatcttaagcgcgctggaaattgatacggattttaacgtcaacgttctgaccggctccgacggcgtgatgcgcggggcatcgggcggacattgcgatgtcgcggcggcggcaaatttaactatcgtggtcgcgcccctgatccgcagccgcattcccaccgtcgtcaggcacgtcacgacccgcgtaacgccgggagagagcattgacgtgctcgtcaccgaccacggcattgccgtgaatcctgcccgtccggaagtcaaagagaggctgacggcggccggtttgccggtcgttgacatcgaagcgctttatcagacatcgctggtaatttctggcgagccgaaacctattgagtttacctcgcgcattgtcggcgtcgtgcgttatcgcgatggcagcgtcattgatgtggtaaggcaggtgaaagaatgatcggcgaaacaacaaacgcttcctgcgcccctctcacccttgaggaagtcctcaaagccagagaagcgcgcgcgagtgtacaacaggcgtggctgcgccgcttcgaacaaccaatggtatccaccacgctcgtctggcccggagaggtaaaagatacgccgcttgcccggcaggttatggcggaggcgacggacgcgttcagccagctgctgcggaaacatcgctggggcgtttccagacacgacgttcgttttcagcccaccgggcccgaagcgttctggtctgtagcggcgccagcctggatgatcaagcacgtgacggcgcatcttgaagatcatcatcctctcgggcgtctgtgggatatcgatgttttttgtcccacatccggattaattaagcgcagcgcgatccgacagccgatgcgcaaatgcttcatttgcaatgaggctgcccacgtctgttcccgtatgcgccgccattctcagaatgaacttgcgcaagtgattgaggatttagcctatgactattttcgcggtcaacgctgaacgggctgagcaacgggaaagcatcgcctggctggctgccgaggcgatgtatcgggaagtgagattaacgccaaagcccgggctggttgatggcgagaacaatggcgcgcatcgtgatatgaacatcgccctgtttatggccagtattcgcgccgtctcgccctggtttccgcgcttttttgcgcagggaaaggcgacggcggatttgcctgccccgcagacgctattggcgataaggcccacaggactggcctgcgaacaggcgatgtttaacgccacggggggagtaaacacccacaaaggcggcattttttccctcggcctgctgtgcgccgccgctgggcgccttgttaagcgcaaccagatgcttagccagcgcaatctgtgcgaggaaacccgcgcgatgtgcgcgggcctggttagccaggaactgaaaagaaagggcctcgccaaaaccaaaggcgagcatatttttcagcgctttgggcttagcggcgcgcggggtgaggctgagaacggcttttataccgtcaggcagttcgggctgccgcagtggcagaaagcgcggcgggagggggtatctgagcaggatgcgctgctcaggatgctgctggccctgatggccttcaaccccgataccaatgtggtgtcccggggcgggctgagcggcctgcagtatgtgcatcgctatgcgcaacgcgttctgaagatagaacacctggcgggtgaaaagctcagaaaagcgctgagacacatggataaggcgttgattgacagaaatattagccctggcggcagcgcggatctccttgccgttggctgggtactttcccattacccggcctgacgggcggtactgaacgtggagaggaaggctttatgactacccaacgtctggaacagctcagcgagaagttgacgattattctggtgccgggcttgcgagacagcgatgagcatcactggcaaagctgttggagtcgtcgttttcctttttggaagcggataagccagcggaactggctggagccggatatcgatgcctgggtatccgctatccgtcgggagctggctacctgtcagcggccggccgtgctggtcggccacagctttggggcgctcgccgcatgtcgcctgattcagacgcaaaaggtgaacatcgcgggtatcgtcatggttgcgcctgcggagccatcgctcttcgaactggacgaggcggtacttcccgagaggctgcgggtgcccagcctcctgtttgccagccgaaacgatccgttaatgacctttaagcgagcgcagtactgggcgcaatgctggggagggtggttaatcgatctgggtgacgccgggcatattaatgctgagtccggattcggggagtggaattatggtctggagcagttagcagaattttgtgaaggcttaccgcaatttattaaaagttaattttaccaaccgaatatcgctattacataaacaaccttcagataaataacatctgaaacggagagcatatgttagaagcttataataagcatgtggacgaacgtgctgaaaaaaatattccaccgaagccgttaaccgctgagcaaacgcaagaattaattacattactgaccagcaagacctgcgatgataaaaatgcccttgtacagctgttagcgcatcgcgtgccgccgggcgtcgatccggcggcgaagattaaagccgattttctttatcagcagatcaaagaagaaaacccggcgagtattattgcgcctcagcaggctattgaactgctgggtaccatgcagggtggttataatgttcaaccgctcattcacttactggacgatccccgctgggccagcagcgcagcggaacaattaagcgccacgctgcttatttttgaaaaatttaaggatgtggaagaaaaggcgaaacaaggaaatgcctgggcgcaaaaagtgattcagtcatgggccgacgccgaatggtttttacgtcgtccggcgctgccggagaagatcacgctgaaagtattcaaagtgacgggggaaaccaatactgatgatttgtcccctgcgcccgaggcatggtcacgtccggatattcctctgcatgccttgtccatgttgtgtcatccgcgcgacggcgtcagcccggatgaaccgggaagccgcgggccgatacgacagctagagcagttaaagaaagagggctatccgctggtctacgtcggcgatgtcgtcggcaccggctcttcgcgaaaatcggccactaactctattttatggaaccttggcaacgatatgccatgggtgccgaataaacgaagcggcggctttgtttttggcggcaatattgcgcccatcttttttaataccctggaagattccggcgcgctgccccttgaaatggatgtttccgcgctatccacgggaatgctgattgatctctatccgtatcgcggggaaatttgcgaagcccacagccagcgtcctgtcacctcattttccctgaaaacggacgttctgctggatgaagtgcgcgccggagggcgcattccgctgattattggccgcagcctgacggccagagcgcggcaatcactgaaccttgcgccctccgacgttttccgccggccgaaagcgccggcaccctccgccgctggctttacgctggcgcagaaaatagtggggagagcctgcggcgttgccgggatccgaccaggacagtactgcgagccgcgagtcaccaccgtcggttcgcaggataccaccggaggaatgacgcgcgatgagcttaccgatctggcctgcctgaatttttccgctgatttggttatgcagtctttctgccatacctcggcctatcccaagccggttgatgtgaagctgcatgaaacgctgcccgagtttatcagccaccgaaacggcgtggcgctgaagccgggtgatggcattatccactcctggcttaaccgtatgctgattcctgataccgtggggaccggggcggattcgcacacccgtttcccgcttggcatctcttttcccgggggctccgggctggtggcctttgctgcggcaacgggcattatgccgctggatatgccggagtccgtactggtccgttttacgggagagatgcagccggggataaccctgcgcgatctggttcacgctattccgctctatgcccgcaagcagggattactgacggtggagaaaaaaaataagatcaatattttctccggccgtatcctggaaatcgaagggctcgggatgctgaaagcggagcaggcctttgaactggccgacgcctcggccgaacgctccgcagcggcgtgcgtgctgcgtctggaagaggagaacgtggcggaatacctgcgctccaatgccacattgctacgctggatgattaatcagggttatgaaaatgccgacacgctggcgcggcgaattgcggaaattgaggcgtggctggcgaatccgtcgctgctggtggccgatgagaacgccgaatatgccgcggtgattgagatcgatctcacggaaattaccgaacccatcgtctgtgcgccgaacgatccggatgacgcccggctgctgtcggaagtcgcgcgtacgccgatagatgaggtctttattggctcctgcatgacgaatattggccatttccgcgccgccggtaaaattattgccgacgcccgcgagatacccgtacggctgtggctggctccgccgacgaaaatggatgcgcgtcagcttgccagtgaaggctactttaatcagtttataaaaacgggcgccagaatcgaacccgccggctgttcgctgtgtatggggaaccaggcgcgggtacgtcagggcagttccgttgtttcaacatcgactcgtaacttcccgaatcgtctgggcaccgatgcgaacgtttttttagcatcggcggagctgagcgccgtggcggcgatgatagggaaaatgccgaccgttgaacaatatttctggcacatggataaaatcaaagcatcaagggacgatatttatcgttacctgaacttcgatcggctgccagagtatcagtcaacgaatgatggaaaaaatattattaaaacattcgctggctaattctttactgcattaagcaataacggtgaatagctcacttgttcagcggaagcttcagaagaaagaggcttctgcttttaatgacacggattgtagccgaggtgaagcatgttgaagtcaaagctaataaaaatagcggtgcttatttttattattatattagcaatcatcattccaccccccgagggattaacgaaagaagcctggatactggccggtatctacctggcatccattataggtctggtgagtaagccttatcctgagccggttatcatgctgtcggcggtaggcttgtcgtgcttaacggtggcacgatttgatgactcccccgtcaggtcaatggatgtactgagcggtttttcctcgggaacgacatggctggtatttagcgcgtttactttgagcgccgcttttgtcaccaccggattagggaaacgtctggcgtactggtttattttaaagttcggtgggacaaccctgcggctggggtatgtcacggcgctgttggatttaatgctgtcaccggcgacgccctctaacaccgcacgcgccggcggcgtcgtattcccgattatcaatagcattgccctggtgttaggttcaacgccaaaagagagtccgcgtcaggccggacgttatctgatggtgaatatctatatggtgactaaaaccaccagctatatgtttttgaccgcgtttgccggaaatgccttagcgttacagttaatttccgatatttttcatatccgcataagctgggtagggtgggctctggcgggggtaccgcttgggctattgatgttagccgtcattccttatatcacctacaaaatagtgcgcccgcaattaaaagaaatagacaatgtaaaaatagccactgcgggcctgaatgacctggggcccatcagttcgaaagagaaagggctgatcgtggtctttatctccgcactctctggctggatattttctcattatctggggctgaatgaatcctccgttgcggtgattgccatggctggcgctttgctcacgaatgtcatttgctggaatgatgtgctgcaaaataagggcggctggaatacgttaatctggtacggcggcattattggactgagtgcgaccttaagcaaagagggattttttaaatggcttgccgcctttatgtccgagcatctggatttcctcggcgccggtaacacgaccattgtgattattgtttttttaagcatcgtcgtgcgctatttattcgcctccggcggtgcatacgtcgcggctatggttcccgtcttcgccaccgtcggactggttaccggaacggcgcctgcgctgctggcgctcgccatcctgttttctaactcttacgggggctgtatcacgcactatggcggtgccgccgggccgattatctttgccgccggttataacgatattaaatcctggtggttaaccgggaccataatcgctttattaacgtttctgctgcatatggttgtcggcattccgtggtggggctttttgattcagcacggaatactctgaggccagccttgttttttattacctgacggctcgcgatataacgaaaaaaccccgacatgatgtcagggttttttaactggcgtgagtccatcatcggcagcgaagctgaaatctaccgccagcaaataaagcgcagcttagatggcgaagacgttaccggcagaagggcctttctggccatcttcaatggtgaattcgactttctggccttcgttcagggttttaaaaccgccgccctggatagcggaaaaatgtacaaacacatctttgctaccgttgtccggggtgatgaaaccaaagcctttcgactcattaaaccattttactaagccagtcattttattagacattgataatacctcaacatatctgagccttacggcgaaaaggtttcgcacagaatctaattaataacgataaggagactcaaaaggaagaattatcaatggataacacttaagatgaggactgctttactgaaccgctttattatgtctgtgtacttaaccgaccaatcattagtcacatacttcaccgcggatagcaagacttatttcaattgatattgccggggcggagagtgatacgggaagagagggagtgattcaccagcgacttgctgatggcgtaatgataataactttcactatttcattgggttaactagatttttggttacggtgacgtggatgaatctgcaagaatgtttttttatttttccgaacaggctcacccggcggtgaagccatatcaccggtcgcagcgcgattaatttaggccgtttctcattatttatccccatcggggtatctggacggctaaaatttcatttgcttattaatggtattcatgccttaatgaaattattaatccgaaaaaacgcatgcacttaaaaattttaccggcccgttctcattaccaggcgctatcgctgatacccctttcttttgagtccatacgtttaatccgacacgttttctgtcaattacctgatgcgcaaggagtcagtatgtcctcaagaattaaaggtctggtcaagtggtataatgagtcgaagggatttggtttcatttcacctctcgatggcggtaaagatatctcggtccattgctcggcgctgcgtggtgataattttaataccctgtttgaaggccagaaagttgaatatgccatcctccatagagatgacaaaggccctgccgccacccatgtcatactgtgcgataaataacgatttatagcgttacgcccgcgatagcgaaagccgtgctggcgatatcacgacggcctgtcccaggattattcctcccttattccatgtcctgtccctgagcgcaacgacagccgcgttgcgtacggtttttcttatccggcgatgcggcagaaatgcgttcaacggattctggaagcgcgtacaattcatcggctttcagtcagtatttaaatccgatgacaggggatggtgatgatcagacgctttttggtgtgtttcttcatgctgtgcgcatgctcagcctatgccgctaacggcgggaatggcggcgacggcgggaatgggaataactcggatgggggcaatggctctgatggcagcgcgaccgcgtctggacgcgatggttgtcccggcggaacgcagcctgactcgtccggaaaattttatcttccaggcacaaaagagccgtgcaatccgggcaggcaggatgccatgaaaagcgcgcgccattagccttaacagccgctgtttagcggctgacgacaagaccgccgaacgagtgaggcaagcgagtctaaagcgcggcgacatcctttcccttaacgcagcgtaaaactcgtcttgtcgttccagctgcgctcgtaccaacctcgtgctatttaatatggcgcggggtgttttcccctttccgacgttgtttaatgcaccgcgtaatcatgacgaaaaagacggggacaaagaagatagccagcaccgttgcgcttatcatacccccgaagacgcccgttcccagggcatgctgggtcgtgtcgctcgccccgctggccagcatcagcggtacgacgcctaatgtaaatgccagcgaggtcatgagtattgggcgtaagcgctgcgttgaggcgagtaatgttgcatccaccacgttcattccctggctcatcagttgtctggcaaattccacaatcagaatcgcatttttagcggaaaggccaatcagggttatcaggcccactttaaaaaagacatcgttggtcatattcgccaccgtcacggccacaaccgcgccgagcaggccgagaggaaccacaagcattaccgcgaagggaatcgaccagctttcatagagtgcggccagcaccatgaatacgaccagcaccgagagtattatcagccccggcagctgtgacgcggactgcttttcctgtaacgaactccccgcccattctccggcgaaacccgccggcaactggtccgccagcttctccatcgccattattgcgctacccgtggactcgcccgcggcggcgcttccgctaatgcggatggccggatatccctgatagcgattgagctgctgcggggcaacgttccaggagagcgtcacaaacgccgccaaaggaagcatccgccccgagcggttcttcaccgacagggtcaataactgctccggttgcatacggtagggcgcatccgcctgaacgatcacctgttgaacccggccattattggtatagtcattgacgtaactggagcccgttgcgacggtaatcgtttggttaatctcatcaaacgatacgcccatcgcttccgctttttccctgtcgacgttaagcatcaggctactcccttcagggagcccatcgatatagacatcgttcaacaggtgactctggttcgcacgctttaccagctcatccgctgcctttttcagggccggatagcccttgccgccacggtcctgcaaataccaggtaaacccggatgaggtccccatgtcggagatagccggagggagcaggctcatcgtgacggcatcgggaacgctttccatactgctttgaatatactctgcttcaccctgggcggtcgcgccctcgcgatttttccagtccttcaaggtggtgaaagccatggcagagttttgccctgagcctgaaaacccaaatcccaggatcatgatgttgctttcaacggcctgccgcgcggcaatttcatcttcaaatcgttgtaccaccttaagcgtacgctgcatcgtggcgtcggaagggagctggatcgacgacataaagtaaccctgatcttcatccggtaaaaatgacgaaggtaatgaggatagaccggcatacagcgcgagacagagcgcggtatacagcagcatcatgcgtccggtccgtttcagaacaaacccgagcccggaggcgtaaaatgaggcgaggcggtgaaaacgggcgttaaaccacgcggaaaaacagccgcctttgctccggtcaggctgatgcggccgaagtaacgtagcgcaaagggcaggggtgagcgtcagcgccaggaatgccgataataaaatggatactgccatagaaatgcagaattgccggtaaataatccctaccgacccgtcggcaaaacccatgggaataaataccgcggtcagcaccagcgtaatacccataatggccggggtgatttcactcatcgcttcccgcgtggcctgcttcggggagagccccttttcttccatgaggcgctcaacgttctccacaacaacaatagcgtcatcaacaatgatgccgattgccagcaccatgccgaacatggtcaggatattgatggaatagccgctaaacagcatcaccgttaaggtgcccagcagcgccaccggggctacgattgcggggataaacgtgcagcggattttgtgcagaaacagcagcataacgagaaacaccagcaccattgcttcggcaaaggtttccaccaccttcaaaatagaaagcttcacaaagggggcggtatcaaacggaaccgtgaacgccattgcttcaggaagcacgcctgaaagctccgccagccgcgcgcggacccccgatgccgtgccgatcgcatttgcgccgggagagagctgaatagcggcagccgtggcgggaacgccgttttctcgtatgccaaaagcatagctttgtaacccggactccacgcgcgcaatatcagccaactttagccgtgcgccagtcacctcagattttaaggtaatgttgcgaaacgcctcaaccgatgagagctgacctttaacggttatcggataagtaacggcctgctgcggcgtcgttggttcatctcccgttctgccgggagaaacaatcacgttttgttggccgacagcgctcaccacgtccgtgacggaaagcccgtaaccgtggagctttataggatccagccagatacgcagcgctttttccccgccgaagagctggactttgccaacgccagggacgcggcgcagctcatcgatcacattgcgagcaaaatagtcgcttaaatcagcctcctgatactctcccgtcggggattttaaccccaccatcatcagaaagccggaattggccgcctcaaccgttatgccattttgccttaccgcctgtggtaaacgcggctcgacgattttaatctggttttgcagatccatctgcgcgagcttaacgtccgttcccggtctgaaggttaccgtaatggaagccatgccggtggtatcgctggtggattcaaaataaagcaaattatccacgccagaaatctcgcgctcgataagtgaaacaacagacgtattcatcacatccgggctggcccccggatagctgagcgaaataataatgcccggcggtgcgacggcaggatattgcgcaaccggcaggcgcggaatggacaatattcccgtcagcacgataaacagcgcgaccacccaggcgaaaataggacgttcaataaaaaagtgcggcatcagatagacatccagtcaacaaacaaaaaggtcagtaaattcaggatgaccgctcggtttcccggggcctatcctccggtaaactcgtgcgatagcgtcatccaggcggcaacgttcgagcaattgtctcctgcgcgaatggcatatatcgccatccggccagaacgaggccgaggaggaagaggctaagtctaaatgcgcgatgttgaccgccaatggccgatttatggagggagtgtgtatgcatattcccggttaatcttatgaacgcggctgccgcactcggctaaagagggctatctttctcatggcctaaaatcaaattatccgcatcaataaatacgccggagaaccgcagaaaacgatcagcaaaaagcactcataataaaagataatatcatatatgtcgggtatgatattcaaaagtatattaaatacaacaatgctataaataaatattaataccagccagaagacgataatcgctaattctcttaacgcgccaggtttcttttggaatataaacgccaggactgagaaggtgatgctggcatggaccaatggcgatgacagcgtcgtggaagctaccttttcatcaatggcatgtaccaggtataaccataaataaagtaacgcccatgctgtcagggaaaatataaaggcagcgagaactttttcacgacgaatattacttaagctttccataatgttttctctgacaggggcccacatcagttgcctggcgagctgaattctcaggcgtgcgtgtcacactcacgctttcacttttcttcctcgatgaaggattgtcgcagcggtatgttgattgtttatttcgtgattgtgtagccagtatggagacgcgttccgcgtgctttatatcggcaggaaaaaatgcggcgtgtgcaactttttaactcctggcttgtcacattgcttttaacagggaaaatatccactcgcggctggtgcctgagattaggttgtagaatgtttaaacaagtacggcataaaatctttttaagataaaataaaatctattatcggtaatgtggaaactaaaatgaacaaaagcaatctgataattatcgccgaggatgacgatgaaattgccgctattctgacaggctatttacatcgggcgggaatgaaaacctgtcgggcggaggacggcgagcaggcgataaatcttacccgtctgcataaaccggacctcgtgttactggatatccatctacccgtttatgatggctggaacgtgctgacgaccttacgcaaagagactaacgtgccggttatcatggtgaccgcgcttgatcaggacgtcgataaactgatgggactgaggctcggcgcagatgactacgtgataaaaccgtttaatccctccgaggtgatcgccagagtggaagcggtactccgcagaacccggccgaatgccgaagtcgccaattcaaggccattaagattgccgtttctgaccatttatcccgatgaattttatgtggaaattaccgtcgagaataagattgtcaccccggtgttgaccaccaccgaatttaagcttttgacctacctggcgcgcagtccgcgaaaggtgtgctcacgcgaagagttactcgatgcctgcctgcccgagggggattcacttgatcgaaccgttgatagccatatgagtaaactgcggaaaaagcttgaacacgcggggctcaaaggcatcccggagagcatcagaggagtgggctatcggttaggtgagaaaaaatgaacaaagaaacgattctgagccgtcagatattgacctatatgctgtcgttaaccttcattattatcgctatcgccgtggtgggctcttatctattttatagcttcttgattgactacctgccgggaggcgccgtctccgggagcgaagatgatatgaccttgctggactggctgtggatcatgatagcttcagtcaccagtctggtggtatcgctgttttttaccgtgaaactctctgccagaatattgacgccgctaaatgccgttgcccagagcctgaaacaaatttcgcagggcaatcttggcgcaagagcgtccggaaccagctctcagctgggcgagattaataatcttgttaatgatttcaatgaaatggcggaaaagctgcagaccctcgacgttcagcgaaatctgtggaacgcggccatcgctcacgaactcagaactcccgtcactattctgcgcggaaggcttcaggggctggtcgaaggggtgtttgagccagagcccgcgctattcagaaacctgctgagacaaacggaaggcctgactaatttaatcgaggatctgcgggtcgtaagttcctccggcggcgccggctatacgctgacgctcagcgaggtcgatctcgaagcgacgattaccagcgcgcttgacacttttttaccggagtttcgtagcaagcggttcacccttatcactgaactcaagcagcagttgtgcgtttgcgatcctttgcgtatgacgcagtgcctgacggtactgttcgataatgcgttaaaatattccacctcccgaactttgctggtaaagaatggaacctctggcaaagaaaattatattctggttcaggatcgcggtcccggaattcctgaagaactccagcggctgttatttgaaccttttcagcgcggagaatatgccagacatattaatcctcaaggctgcggattgggattatcggtcgtcaaagcgattatgctcgctcacggcggcagcgtgagctatcggttgtcacgagaaaatcactcgatttttaaattatcatggcccgtcaacctgccctgacaaaacaggctcaattgagcctgtttctggagacatcagtgccacatgtccccgagcttagcatcccatatcgccggtgtgatattaagtttacctcgcttcggacttaatgttatttcactgaaatagatttcattttcttttagcatcagatcgacacggcagtagtcaatctcttttgccaattcctgcgcggcagtgacggcgcgatgaaaggattcgggttcaggtaccggccccggcgtgtttggatattccatctgaaaaggctgcagccgccacgatctgtcatagacattaatatattcgcgcccctgtttatcggtgaaatcagcctccacaaagcaggctaccccatgaaaacagtgtattcttaacatttcaggcgtaacgttcttatctcggtcagaaaataagtcgataaacatctcacagagaataaccggggcaatatgcttatattgccactctcgggttgtgtaatacatattctttttgagcgccagcttgagtcggtttaaggtattggccggattaaaattgtctctgtcggtgcatataacggtgctgccgcagtcatgattgcacttcaacacgaattttgccgggagtctgctaaaatcaatatcctctgcgcggtggtaaacgccaattaacggtatcacctgcacaagctgcgttcgtgtacggacatattctctgaccgccagtttgtcggccagcagagtataaagggcgttatgatcgaagacgaggcggtggcatatcttctcactcagcgtgataggttttttgagattggcaaaggtttgcgacgctttgttgagtttggcagtatgaaagtaaagatccgaagtcatcattccccggcattttctgaataagtattcgacgtatttaagagagtagttcagcttgttcatggttcctcctgagcgtaatgaatattctgacgaaggaggattgagtgatattgttcagattatggagtggagatggagcagactggctgtggcgtgaaataacaacgcgtccgcggctggcgccagtaagaacgggcttttagcgaatcggtaaaaatacctttgatacggctacgctgggcggtaacaacagcatgtcagaagggttgtcagttttaacttaaataaggatatcggtatgagtcagatggtacggaaaaattaccctgaactgggcgaggtcaaggcaccctacgttcattcggttaagcacgggaacacgctctatatttcagggctcaccgcgtttggcacccgtgcgcagcaggccggtattggcgcacaggcggaggaggtttttacgcagatacgaaccgttgcccgcgccgaaggcatcgatttttcctctcttatcaaagtcacgatctttatcacttcttttgatgagatcgacgagttgcgcaaagtgctttaccggaactacggcgatcatctacccgccagctcgctcgtagaagtcagccgcctgttttctgcggatctcaaaattgaaattgaggcaatattcggcctgtgagccagtgtttattgcccgggccgcggtctgcgccgccgggcagactcaatcaatttatttgaagcattcggttaaacaaacgatatttattctcaccgggttatgcgtagagtagaggcataacgcggcagacacgtttttcattatgcgccacctgccaacgacctccctgcaacccaggacacccacgtcatgaaaaagattggctttttgtcatttggtcactggacgccgtcgccgcagtccgggacgcgttcggccgctgatgcgctgctgcaatccatcgatctcgccgttgccgccgaagagctgggcgcggatggcgcctatttcagggtgcatcatttcgcccgccagcttagctcgccgtttcccctgctggcagcggtcggggcgaaaaccaaacgtattgaaatcggcaccggcgttatcgatatgcgttatgaaaacccgctgtatatggccgaggatgcgggcgcggcggatttaatctccggcggccgtttacagctgggtatcagccgcggctcgccggagcaggtgatcgatggctggcgctattttggttatgttcccggcgagggcgaaaacgagtccgacatggcgcgccgccacaccgaagtgctgctggacgcgctgcgcggagaggggtttgcgaaacctaacccgcagcccatgttccccaatccgccgggactgctgcggcttgagccatattctgaagggctgcgcgagcgaatctggtggggcgccggttcgaatgcgacggcaagatgggcggcaacgctggggatgaacctgcaaagttcgacgctgaaagacgatgaaaccggcgagccgttccatatccagcaggcgaagcagatccgcgcctatcgcgaggcctgggcagaagcgggccatacgcgcacgccgcgggtttcggtcagccgcagcattttcgctctgatgaacgatcgcgaccggatgtatttcggttcaggccgtgacgagagcgattcgataggtttcctcgacgagaagacccgcgccatttttggccgcagctacgccgcagagccggataagctggtcgaacagctgaagcaggacgaggcgattgccgaagcggatacgctgttgctgacggtgccgaaccagctgggcgtggagtataacgcccacgtgattgagtccatactgaagcacgttgcgccggcaatgggctggcgcgacgcataaacccgcgctgagcgacgccccgcaggcgcggggcgaaagggttttacgctgcgacctttggctgtagctgatagatccaggcggtcacgcgctggccgtcttccatggtaacgtcaacggcaacgcggtcgtagccctcttcaaacgcatccagcattggccagtgggcgctaagattcgcggacaggaacagatagccgtcgacccgaggcccgttgttgtcgagcacgatccccggaaaatccgccgccgctccccagccgcgttcataaaacagaccctgtacatagccgggcagccactcgccgccaatgttgtccataatatgggcattggagtggcccggacgcagcgtgccgtagacaaataaacgttccattattcctcaatcactcaagcgttgaaggcccggacgggcagagcaggtcttaaaatacgagctctggccggggttggcaaggcgccccgcgggacgcccgctcttcatcagggctcaggtccgaacatctccagcagctgtttcttgtcgggcatgccgaccacctgctggagttcgttctgttcgttcatgtaatagatggccggcgtcgcgctggcgcccaaatcatccatcagcttttggttatgctgaagaagattaaaggtttcgcgcggcgtcacgccgtcaaagcgcggcacttttttgccgccggagagttcatactcttgccaggcggctaccggatctttggcattcaggattgccgtggcgtatcggccgcttttcggattgagaaaggcaaccagcagggtattcaactggaccttaccggcttttacccacggctgcgccgccgaccagaacgtcttgcagtaagggcagaacggatcggcgaagacgatgacttttcgggccgccgaatccgcgccctccttgagcggcccggcatcgttcagcttcttccacatttcgcggcctaatggggtatagatcgcttctttaaaatacccctcgctgaggttttgccctttatcatcataaagatacccggaaatgacgtgctttccgtccggggttaaaaacagggtcacccccatatcctgatactgaccgacccagccttttacgccgccgggggaatctatctccttgataattttgatcccttgctgttcaccaaagtttttaactatctggggaatcgccccctccgcaagcgccaggcccggtatcatccaggccgccagcaggaaaatatatttcatcatatcgcctctcaatgcagggggaacgctccccctgacgtgggttactgttttttcagcgcatcgccgattgtggcatcaaattgctcccaggggatccagcccgacagcatctcatcaccaattagcgtggccggcgttccctgaatgccgagcttttcggcgacagagaagcttttctgaatcgtctccaggctttgcgcatccggcttagccacgatgacgcccgccttttttttcgcctgctcaaggctggcgccgtcgtgataccccttttttgccatcaggatcgcattaaatttggcgaactgttcaggatgcgtgcgccacagggtgagcgcatccctggccgcggtcattgagctttcggagcgccagggcagaaacttaaagatcaccgcaacatccgggtatttttccacaatcttctccagataggggtcaaactttttacaatacggacagttatgatccgtaaagaccaccagcgtcagcttcggcttttgcgcgccgattcgcggtgagtgggggtcgtgaaagagaaaatcgccgtactgcgacagcacctggttgagcgattcctgttccgcccgggcattctgccgatcgagcttatcggccgcggcgatcaaaatttcaggatggctgagcagcgtctcctggaccagtgcctgcacgcgggcctcctgcgccggcgtgagcggcgacgaggctgacgccgtcaacgacgccgagagaagaagaaaagtgagcagcgtatttttcatcgttaattaacctctggcatgagtgagcgcgttcaggacgctttgttgatcgagcagcggcgggagcgtctctccttgcggcacgcctggaccgtagacctgattgaagggaatggcgtaacggtttcggctttgcaggaaacgggctatcggctcagagggcttgctccagtcgccgcgcagcgcgacgacatccggctcagccaacgcgctgatgatggcgggctgatttaacacccggtgttcattgactttgcacgtgacgcaccagtcggctgagatatcgataaacacccgtttgccatccgccagcgcgctctggatggccgcctcgctgagaggctgccagcgaatttgctgagcgttagcctccggcgacgagacgatagcaccctcggcgagcaggccgcgaacctgaaagccggcaaacgccgccagcgcgataatcaccagccagaaggctggcgtcgctcgcggacgggcgactaacaaggcgatcggggccgccacggtgagggccagcgtcagcatgccgcccgccgtttcgcccaggtgcaggccgagcagcgtcgtcagccagaggctggaggccagcatcatgacgccaagcgccattttcagggtgttcatccagcggccggggcgggggagcagggcggcggtttgcgggaacagggcgacgaacagccacggcgcagccatccccagcccgagcaccagaaaaatcagccacagctcctgaagcggagcggcaagcgcgaaagcgacggccgtacccaggaagggagccgagcagggcgttgccagcagggtggcaaaaacgccctcgcagaagctgcccgccatcccggcgccgccggcggtcgccagccggctcacggctgccgagggaagcagcatctcgactaccccgaagaggttcagcgaaaagagaaaggtgacggcaaccattaagccgataaaccagggattctgaaactggatcccccagcccagcgatgcgccggtgagcttcagtatcgtcaccatcagcgccagcagagcaaacgaggtcagaatacccgcgctggtggccagaaaacgcagcctgaccatgccccggtctgaaccggcctgcagcaccgcgctgagcttcatgcccatcaccggcaatacgcacggcatcaggttaaggattaagccgccgagcagcgcgaaaagcactattttcccgaaactaaccgttgccgccggggcgatatccgcgccagccgtaaggtttatctgctgcgctttttcaccatttgtcagcaccaacgacagcgcttttcctgccagcgtggcgggtatttctccccattcgtcggtgaccggtaccgtcaccttgaggtggctgccctcggcgcgaatgtccggatcgccggccacaattcccccgtccatagggtcaaaatagatcccggggtttttccattcgccggtcgcggtggcggtgatgaccagctggctcccgacccgatgcgcggcgagatcgttggttacgccggtatctgccgggacagtgcgcatggcccgggcaaaggcgtgccggaaatcgccgtccgcgggctgattgaaatcgagacgcagacggtagtcggtcagcagacagacgttgctgcaggtcgatagcgtaagcgtgccttccagcacgtcgccgggggcggcggcgatcgtcatcgggatcgcgacccggtcatggtagccctgggtcgtcaggccggaaatcttgaatcttgacggggcaggccagtaccaccgcgcctgttccccgttgttccagatgatttgcggggcgacgccgccttcgcccggcgagcgccagtaggttttccagccggaagccagctcaatagagagcagtccgtcgatccgatcgtttcctttttccgcctgaaagcggatccgggcatggtcgttttgcggggatgtcagccatccggtgtccgccccgtgggcaacgcccgcgcaggccagcaacaggaagacgacgcccctgaagatattcagcatttttttctccgtgaatttaaaaattaatcgtctaagaacgatttttcattcacggaaaacgcagtttttaaggtgtattcgcagcgtgggcggccggacgggatcgtcccggaaaaccaccggacgccctgcggtgagcagctgaagcagggcgaggaagagtatgacggcaggtaaggcgccatcaaagaatagcggctgcgcgcagagcagggatttagcgctcagctgacagggcgagggtcctggctcagcctcctcagaagacggctgctgggcctgcgcgctgaagggtatcgcctgcgtgccggcgccgacatcggccaaaaaatggtgcagataggccgcccgctgaacaaggcagaatgccatgaccaggcaggtcagtatcaaaaaccatttaccaggaagccgacgattgtgcatagggtaccaggacaagacagaacccgaggatcataaacaatccttatcaatgtacaagaggctggcgtgtaaggttttgtctggatggataacgttgccggcgtatgcggcggaaaggcgggcgttcaggtatttagtacatttatattatttacagcgttgatgcatccggctactattcgcgtcgctaagcggtaccggcacgccgctgccggacgtgactgcttagcgcctgaccgccattagctcatctggaagagcgaacgacgtacgttgtagggaacggggttcgaggcctcgatggcggcccaacacttgcttagcgaatccgcacggtatcggtaataaagcctctcgcttctgttgaatacgcctctgaacatctttaatcactccttttagatctctttcctgctattgctacatagccgttattattgcctgtgaaataatttctcttctctcgctattactcgcaacggaatgtgattgcctggttttatcgcgactgccctggcaaaggaatatctgaatttggagtgtttaagatttacctaagcaaatctgaataattttaatgtgaatctacttattaggatttagtcgcgtatttttcagaaatttcatcactttttatatggtattctcccttgttcaaggagtgaacgaaggaaaaaagaatgctttaccgctatgccgttttctccagaaaacataatacgtttcatattcttttactgtttaccattttgataataagtttcatacatttgagcgtgctgctggaaaccgataacacatggctgctggggccgatggtgatttatctgcccatttttttcctttggcgaaaggtctcagtgttacgaagcagaatcgctgattaatgtgctggtggagttccctacatgagtgaaaatacaacatctaaagcaacctctgaaccgaaagtccggcagcccgtcttgcggaaagtcgatcttaacctgttaaccatttttgataccgttatgcaggagcaaagcttaaccaaagcggcgcacacgctgggcatgtcgcagccggcggtcagcagcgcggtctctcgcctgaaggtgctgtttaaggatgaactgttcgtccgcaacggccgcgggataaaaccgacggagcgcgcctttcagctgtttagctccgttcgtcgcgcgctgtcgctggtgcaaaatgagctaccggatacgcttttcgacccgctggactgcgaacgtaattacaacctttgcgtctgtagcccgttggataactacctgactccgcttatttttaacaaaatcagcgagattgctcccagggtcactctttcctttaaatcttcgctaagtcagcaggtgacaaatcagctgcgctatcaggaggtggaatttgtactcgattacaacaaattcaatcatccggaatttaccagcatcccgctattccatgaccgaatggtgctggtggccaggcgcaaccatccgcgtatcgcatcgccgctgagcgaggaggatatttatcgcgagcagcatgctaccgtcgcgctggatcgctacgcctccttcagctatccctggtatagctctgaagagcagcaggcctgcgtcgcttttcacggtaacgcgatggtcagcgtgttgagcgtggtgtcgcaaaccaatatggtggctatcgcgccggaatggctggcgaaagagtttgaagagcagtttgcgctacagctgctgccgctgcctttagaaatggacagccgtacctgctatctttcgtggcatgaaacggcgggccaggagagaagccatcgctggatggcggagctgctaataaaaatttgccagcgctaaatagacctgaagaaatgcctggtaagacgccaggtattttattattcacgctcaactctcgccctgaacattaattaagatccccgctttattcttgttcatcaggcactgatgaccagataaaatacgctgtattaataaatttaacccgccagaatttcattaaaaaatctatttacctaaaatcgcgcatttctccggcagagccaaccggcggtttctgtacccaatggatttcgagttgctttgaggcggcaagagagagacaaattcgtcgggaacgaatttgaccagccgaaggctggccgccggtgagaggcaggagcctctcattaatccccaggaatttactcaagtaagtgactggggtgaacgaacgtagccaacaaaaaagcaacttgaaagacgacgggtatatactcttattatccagccgggccgacgcctgaaccaggggatgatgttgatgcgcagaaaaatgatgaagcctgcggtggccgtcgccaccctgatgatgtcatcgacggccctacaggcggatgaaattaacctgtattcggttaataccggctcctggatttaccatctgtcgaacaaccacggccagtacaccgaaggttttgacaaccagtttgcctccgttgagcgcagattctccaaagattcgccgtacagcctgctggccggaacgatgaaaaacagctttgacgatcgctgcattgcgctgggggttcgccgcgactgggtctcgttgggcaacggctgggtgtttaagggaatttatggctacgttggcgagttttttttctcggccttcgagcactgcggcgatcatggttcttataaggattttaaagacgccaccggcatcggcttttctccctatatttatcatggtttccaatacaactttaccgattatttcggcgttgaaagcggaattattcttcccgccgtctttgtggtgagcatacagtggagtttccgctaatacagtggcgaaaacccgcccgctgtggggctttgaaagaaccgtaataaaaaatgaagctatcttaaggttattttaatcttcaccgcggcggttatttttttatagcatttttctcgcccttatccgcccgcgctcagtacatttcacttttttcattagatggtaattgtttgcattatcattcacattcctctgtgatttaatccttgccggccggcggccagtgactcttcgcccacctctattaaggattagtttatgcgttttcgtctggtgtcttattgctccgctgcattaatggcttcttccgcgtttattgtcccgcaggcgctggcggcggccagcagcgacgggattgtggtctacaacgcgcagcatgaaaatctggtgaagtcctgggttgacggctttaccaaagagacgggaattaaagtgacgctgcgtaacggcggcgacagcgagctgggtaatcagctggtgcaggaggggacggcatccccggcggatgtctttctgaccgaaaactccccggcgatggtgctggtggataacgcgaagctgtttgcgccgctggcggctgagacccttcagcaggtcgccccgcagtaccgccctgagcacggccgctggataggcattgccgcccgcagcaccgtattcgtctataacccggcgaaaatcagcgaagcgcagctgccgacatccctgatggatctggcgcagccgcagtggaaagggcgctgggccgcttcgccatccggcgcggattttcaggccatcgtcagcgccatgctggcgctgaaaggcgagcaggaaaccctggcatggcttaaagcgatgaaaaccaattttgtggcctacaagggcaacagcacggtgatgaaagcggtgaatgccggtcagattgatggcggcgttatctatcattactaccgctttgtcgatcaggcgaaaaccggcgagaacagcaaaaatacccgtctccactactttaaaaaccaggatccgggcgcctttgtcagcatttccggcggcggcgtgctggcctccagcaaacatcaggaacaggctcaggcctttatcaagtggatcaccggcaagcagggacaggatgaactgcgcaccaataacgcctttgaatacgccgttggcgtcaacgccgcgtccaacccgaagcttacgccgctgaaagcgttagaggccccgaaggttgagccgtcttcgctgaacagcaaaaaagtggttgatttgatgacccaggctggcctgctgtaatcgtccgttaaagtgaacacgctatgtcttctctgagtttcgcgctcggaaaaaaagcccaacgcctgcccgagcgcaggcgtcctgcttttccgatgatcgcgttagccgttctgttttctctgctggcgcttttgccgccgggttttgttattgccgtaggggtcgataccggctgggagacaatccaggcgctggtctttcgcccgcgcgtcgctgagctgttgagcaataccctgtggcttatcgcgctgacggtacccctgtgcattgcgctgggcgttggcctggcctggctgacggagcgcacgctgctggcggggcggcggctctggtcggtgctggcggttgcgccgctggcgatcccggcctttgtgcaaagctacgcctgggtcagcgcggtgccggcaatgcacggcctctctgccggggtgtttctttcgctgctggcctactacccgtttatctatatgccggttgccgccgttctgcggcggctggacccgacgctggaagatgttgccgcctcattaggtacgccgccgtggcggatctttttccgcgtggttttgccccagctcaggctggcgatatgcggcggcgcgctgctggtggcgctgcatctgctggcggagtttggcctgttcgcgatggtgcgttttgatacctttaccaccgccatctatgaccagttccagtcaaccttcagcggcccggcggcgaacatgctggccggggtgctggcgctctgctgtctggctattttgctgctggaaggggcgtcgcgggggaaagcgcgctatgcccgcatcggttcgggcgccgcgcgcgaacagcagcggcagccgctgggccggctggcggcgatccctctccagctcgcgctgctgacgctggtgatgctggcgctgggcgttccgctgatggtgctctgccgctggctatggctgggcggcgtggagaactggttaaacgccgacctctggctctccctgcggcaaacgctgctgctcggcgcggtgggcgctctcctcaccaccgcctgcgctattcccattgcctggctgggcgttcgctatccgcagcgccttattcgactgctggaggggtgtaactacatgaccagctctctgcccggcatcgtgacggctctggcgctggtgacggtcaccattcactacgcgcgccccatctatcagaccgagttcacgctgctgctcgcctggctgctgatgtttatgccccgggcgctggtcaacctgcgcgccggcatcgcgcaggcccccgtggagctggaaaacgtcgcccgcagtttgggccgcagccccggccgggcgctgtggagcgtgaccatgcggctggcggcgccgggcgcggcggcagcggcggcgctggtgtttctcggcatcaccaatgagttgaccgccacgctgctgctctctccgctcggcacccgcacgctgtcgaccggcttctgggcgctaaccagcgaaattgattacgtcgccgccgcgccttacgcgatgctgatgattctgctttcgctgccgctgaccggcattctctatatccagtcgaaaaaaatcgcaggcctgtaaatgcttgaactctcctcaatctcaaaatcttttgccggtacgcgggtgctcgaaaacctgaatctgacggtggccgcaggcagccggacggcgatcgttggcccctccggctccggtaaaaccacgctgctgcggatcctcgcgggtttcgaaacgccggatagcggacgcattgttatgcaggggcgcacgctgtttgcgcaggggacatttattcccgcccacctgcgcggggtgggctacgtgccgcaggagggcgcgctgttcccccatctgaacgtcgcggacaatatcgcctggggcctcgacggcagccggcaggagaaatatcagcaggtggcggcgctgatggagagggtgtcgctggaccgtcaactggcgaaccactggccgcacgaaatctccggcggtcagcagcagcgcgtagccctggcgcgcgcgctggcgcagcggcccgcgctgatgctgctggatgagcctttttccgctctcgataccgggctgcgcgcggccacgcgcaaagccaccgccgatttactggcgcaggccggggtcgcgtcgattctggtgactcacgatcagaatgaagcgctctcctttgccagccaggtcgcggtgatgcgccagggacgttttgcccaggtcggcacgccgtatgaggtctacagccgtcccgtcgatgaagagaccgcgctatttctcggcgatgcgctggtgctgcccgccgagcttcgcggcgggcgggcgcgctgtgcgattggcgaaatttcaaccgatgatccgcatgccgtcggccagggaagggtcatgctgcgccccgagcagctggttatctctccctctccggcggatggacagtcgctcaccgtacgcgatgtggactttagcggccacctgtcaacgttaaccctggcgatgcccggccagggcgagccgctgatcgtcaaaaccgtcagccggcagttatggcggccgggggcggcggtacgcattgaggtggtgggcgaggcgcgggtctttgcccgctagcgccgacgggctataaatcaatgcacagattcgccgaccggctgcgggagcagcacagggcgatctgctgcgcgccggcggatttctccgcctccgactgcacggtgtcgcggtggtcgacaaccccctcgataaccggcgtcaggcaggcgccgcaaatccccatctcgcaggagagggggacggcgacgccgttctcctggagcacctgggcgatggtcttatgcgggggcaccggccaccgctctcccgaggacgcaagcgtcacgctaaacgtttctccctcctcagcgccggcgggcatcgcgacaggctgaaaggcttcgctatggatcagcgtttccgcccagccttgttccatggcgacccggcgcgcggcggccataaatccctctggcccgcagagataaatcggatatccggtatgcgtcttgttcagcgcggcggctaaatgctgccgggcgctgtctccttcgcaagagctgtgaatcaccacgctttcggcgcggaatcgccgctgcagttcgcggacaaacgccccctgggcgcgatttttcaggtaatagtgcagcgtaaacggcacgccctccgcctccagccttagcgccatcgcgtacagcggcgtaatgccgataccggcggccagcagcgtcacccgctccgccgcccgtaagggaaacagattgcgcgggggagaaatcaacagcgtctggccgggacgcagctgctgatggatatagcgcgaaccgccgcgtgacgctttctccagcgccacgcagatcaggtagccgtcgtctgcgtcctccgggccggtcagcgaatactggcggataatgccgcacggcagatgaaggtcaatatgcgcgccgggctgccaggcggggagcggtcgcccgtcccgcgccaccagcctgacggcgaggttctggctgccctggcgccagaggccgtcaacggtaacctctactacatcgctcatgatggctctccacttaaacgaggaaaaagtcgccgaagcccatttttttcagtccgcggcgataggcgatggagctgcgatcggcggggatatgcgcttcgagcgttaaatccagcggcagtctctccgggcgctgggtctccaccatcaggcgatcttcctcaaagacgcgcaggttaaaggcgtgaacatcctctaccggtacgtgcagatcgaaattacgcgcgatgggcgcgaacatccgggttatccgcgaggaaaccggcgaggcggcgttcatgatcaccagcctggcctcaccgggaaaatgaatcgtcagggtggcggtaaacggcagatgcatctcgaaatggcgcagccactggaagccctccggcgcgcgaaactcggagctggcgggatagttgccgaccgaactccagtaatcggcgataaaaccaaacgacgtctcctgcgggttatagttcggcaccacctggttatccgggtcggcgaaagtatcggtatggatccaggcgaaatgggcgacatccagaaagccctctacctggcgccccgcaaagccgttgacctcaaaggccgggcagttgatttgctgaaagccgtcgtcgtgccagtgcggcatcaccggcagcggcatcgggttctccgggtcgaaggccaggcaggtccagatcaggccatagcgctcctcaaccgcaaagctggtgaggttgagcttcgccggtaccggctggtcggggctggacgggatacggttacagcggccatcttcgccgaagcgcaggccgtggtacgggcagacgatcccttcttcatcgtgaaagccgagcgtcagcggcacgccgcggtgggggcagacgtcgcgagcgaccaccacctggcccttaatacgatagatcaccagctgctcatcaagcagggtggcttttaccggcgcggggccgatatcgcaggcgcgggcgaccgggtgccagcatttcgccaggcgcagccagtcctcaggctcaaaggtgcaatgggcgggtggggtgggctgtggtctgttcatggcttctcttcctgctcacaaaaacatttgtttaattgttgtgagtttattgttgtcatattagggtgttgacatccatcagcaagaattcatccagccgttgcaaaaaagagaacaggtcaccgatgagcccattttcacgtttcgccctctattttgccgaagtcgcccgcagcggtagcctgcggcgggcggcagaaaagctgcatatttccgcctcggccatcaaccggcaaatcttgcaggcggaagaggccttcggcacgccgctgttcgaacgcctgccggaagggctgcgcatgaccaccgccggagagctgctgtacgacaatctgctgcgctggcaaaaggagtttcatctgacgcggcaaaagtttgatgagctgcaggggctaaagcgcggcaccgttagccttggcatggtgcaggcgctggcggaagggagctttgccgccgcgctggcggatattatcggcagctggcagtggctcgagctgaatttgcaggtcgcggatagccataccgtcagccagaaggtgcggcaggcggatcttgatttcggcctgattctggatcctgaaggccaggccggactgagcgtactggcctttgctgaactggagatgggcgcggtgatgcgtccggatcacccccaggcgcaggctgcgatgctgtcgctaggcgagctcagcgaggagcggcatattgttcccggcgcgccgctgatcgtccacgatcgggtcgcgatgctctatcgccattatgattttttcccggcgaacagtatcagctgcaacgatatccggctgattaaatcgctggtgcttaaaggcggcggcgtgactattctcagccgtctggacgtgctggaagaggtgaagctcgggcagctggcgtttgtcccgctgcgcaacaagctgctgcgcccgctcaccctggccctgtgcaccgcgccatcgcgccagctctcccgcccggcgcagatggcgatccagaagctgaccgccgtgatggaggagatgcaggccgggacagcggcttccccccccgtctgcgtaatatgcccggcctgaaatactctgcggcctgtttccccggtggcgctgcgctgaccgggctacgggttcctctgcgtctgcgatccggtagcccggacaggcgcgcagcgccgcctccgggacggtgtcggggtgatgcatcggcgtggcttcttcccggctcgcgctgcgcttagccgggctacgagctgaccggggctacgggttccctcgcatctgcgatccggtagcccggcgaaggcgtttacgccgcgagccgggaagggggctgatgccagcatctttaccccagcgggccgccctgaatggtttcgcacagaccgttgataatccgctctccggtttcggatttcagctcctgataccaggcttccgtcagcgccatatctttaccgtgggtcacatcgcagcgcttacgcgccttcagcaccaggtcgcgcacccggtcgcagcgctgcgcttcgtactggcgcaatacctcggtgatatcgcggctctggcggaacagatcccccagcaccaccgcatcctccagcgccgcgcagccgccctggccgatatccggcgtggtgctgtgcccggcatcgcccagcagcgccaccttgccgcgaaccagccgttcaaacggctcgatatcatggatttcaatgcggttagtggtctgcgggtcgagggcggcaatcagcttctgcacctgcggcgaccagccgctgaagtagcggctgagatccgcgcgcagggtgctgcgatcctcggccagccccgccgggagcggaacatcaaagaaaaagtaaaaccgtccatcggagaccggcatcagcgacacccgtttcccctcgccaacgaaggtggtccactggttgcccggcgcaatcgcctcatcaatttccaccagaccgttccagttaacgtagcccgcgtagcggcgctcaggggtatagccgagcacgtacgggcgcagcgccgaatggctaccgtcggcggcaatcagaaaatcgccttcagccatcgacccgtcggtaaaccagacgcgaaccccgtcggcattttcttcgcagcgggtgacgcgtttaccaaactgcacggcgtcgcgcccccagaagtcgagcatctcgcgctgcagctcggcgcgggaaaccggacagggacggccgccggtgcgcgccaccagcggcgcgaggctgaactgcgtcagagtctccccgcgcagataatccttgtaagccagaaaatacatggggccgccgtaactctcgataatatcccccatgcctaaatgcttcatgcacttaacgccgttaggccagatggagatggccgcgcccaccggcttgatttctttcaccgcttcaaagacttcgcagtggataccggcattttttaatgccaccgccgcgctcaggccgccgattccgccgccgataactaatgctttcatttgcttctcctttacatacgtcgttattggcttgagcaatttgcgtaccactttggcgcaggcgctgatttcgccgattcgggctccccgcgaccgtgcggttgcacaacgctggtgcgcagagcgggttttattgcctttttatgaatcaataatttctaaatttgcaatggagaatctaatgtttcattgtcgcgccgaggtcagacgccagggggctggcaaaactgatggtttatctgcttgaaaaaacggaataaaattaaatgttgcgcaaatgtgagcgagtttggcctgttttgtgcacccgttcccgcacgcttattcgcaacgggatgaaacgaccatgtcagatgaaaaaaacggcggcttactgtacggccttgagcagcggatcccgccgctcccggctttttttagcgccttacagcacgtactcgccgggctggtaggcattattacgccgccgctgattatcggcgcggcgctggggctgggggagtggctgccctatttgatcagcatgtccctgctggcttccggcatcgggaccttcctgcaatccaaccgcctgtgggggatcggcgcgggcatgatctgtatgcaggggaccagctttgcgttcctcggcgtcgccattgccggcggtatgtgggtaaaagggcagggcggcacgccgcaggatattatggccatgctgtttggcgtcaacgttgtcgccgcgctggtgccttgtctcgtcagccgctttattgaaccgctgaagcgcatttttactccggtgattaccggcagcgtgattgcgctgatcggcattagcctgattaaagtcagcgtcattaactggtgcggcggcgagcaggctaaagcgtttgccagcatgagcaatatcgccctcggcgcgggcacgctggggaccatcgtcctgctgagctgtgcgaaaaaccgctggctgcgtctctcttcggtggtggtggggattgccgtcggctgcgcggcggcggcgctgagcggatcgttccagcttaaaggcgtcggcgatgtctggttccgcttaccgcagctgttcccgtttggttttcagtttaacagcgcgatttttctgccgattgcgctggtgtcgctggtctgcattcttgaggcggtgggggatctgacggccaattgcctgatctctcagcagtcgatagatgacgaggcctttcgttcgcggctgaaaggcggcattcttgccgatggcataagctgcatggtggcggcgatgctgtgcgcgttccccaataccacctttgcgcaaaacaacggcgtgattcagatgaccggcgtcgccagccgctacgttggccgctacatcggggtgattttgattctgctgggcctgtttccgccgttcggcgagatactgcgccagatcccggcgccggtgctgggcggcgcgacgatggtgatgtttggctgcgttgtggcggcggggatccgcattatcacccagaaaccgctgacccgccgcgatatgctgatcgttggcctggccttcggttttggtctcggcattgaagcggttccggcgtttctgacccacttcccgccgatcgtgggtaacctgttcggttccgcggcgaccagcggcgggctggtggcgattgtcctgaatctgattattccggaagagaaaccggccgcggcggcggccacaaggagcaccgatgatcgcgctgaatcactttaatcagctgagcggcgaacatgccgtcgccgtgctggaaccctgcgtggccgtctccggctgggcggcggcgctggccgccggccggccctggcgcagccgcgctgatttactcagcgccgcccggcggctgatggcggcgtggggcgaagcggagctgaccgaggcgctaagcgcccatccgcgtatcggcgaaaagcccgccgggtctcaggcgcacgcggcgctctcgcgtcaggaacagggaagcgttgatgaccgcgatgctgcgctggcgcaggcgctgaaagagggcaacgcccgctacgaagcgcggtttggccgggtctttttgattcgcgcgaaagggcgcagcggggatgaaatcctggcggcgctgtcgcgtcgcctgcaaaacagcgagcgcgcagaagtcgaagacgcgttagcgcagctgcgcgaaatcaccctattaagactggaaggagcgattggcgaatgagtaccttaagcacccatattctggatatttccaccggccgaccggcgcagggcgtaaagattgcgctggagcgcgaaggcgcgctggttgcccgcggcgtcaccgatgataacggccgcattggcgaactcggcgccgggacgctggcaccggggcgttaccggttgtgcgcggaaatcggcgagtggtttgccgccagcgggcgcgagacgctctacctgagcgcgcagattgatttcgtcatccgcgaagcggctggcgagcactatcatttaccgtttttaatttcccccggcggctggtctacctatcgcggcagctaaatttccccggaggcggcgctgcgcgcctgtccgggctatgagttcggcgctgtctgtggtctggtagcccggacaggcacagcgtgccgcctccgggaaagggactactgcgcagccgcatccccccacacgcgctcgccgtttacccacgtctcgctgatattacgttcatcgcccagggtcatcagcacgaacagctgttcatagatatctttgcagcgcccgctgcgtaacttttgcagcggcgtgaccgccgggtcgataaccacgaaatcggcctctttgccgggctggaaattgccaatcttctcgtcaaggcgcagcgcgcgcgcgccgccaagggtcgcatggtagaaggcttcgctggcgcgcaggcgatagctttgcagctggctgaccttatacgcctcgccgagggtgcgcagcatactgaacgtggtgcccgcgccaacatcgctaccgatgcccatgcgcactttgttctgccagcaggtcggtaaacgaaacagcccgctgccgagaaacaggtttgacgtcgggcagaaggccagcgctgagccggtctcgtgcaggcactgccattcggcgtccgcaaggtgaatgccgtgggcaaacacgctacgctcgccggtcagccgatagtgatggtagacgtcaagatagtgctcatgctccggccacaggctttttacccacgccacttcgttgaggttttcgctcaaatgggtatgcagccaggtatcgggaaactcttcccgcagctgccgcaccgcggccagcagctccggcgttgaggtcggcgcgaagcgcggcgtaatggcatagccgaggcggccgcgccggtgccagcgttcaatcagttcgcgagtttgccggtagctctgctccgcgctttcgctcaggtagtccggcgcgtggcgatccatcatcactttgccggcgagcaggcgcatattcaggcgcagcgcttcgttaaacagggcatccaccgattgcggatgcagcgtacaaaaaaccagcgcggtggtggtgccgtggctcagcagctggttgacaaaaaactgcgcgatctccgcggcgtagtcggcatcggcaaactggctctccacgggaaaggtataagtggtgagccactccagcagctgctcgccaaatgcgccgatcatctcggtttgcggatagtggacgtgggcatcgacaaaccccggcagcaatagcttaccgtgcaggtcgcgatagcccttctgcgggtgcagaaagcgttcgccctcctgccacggcagcagcgcctgaatgcgtccgtcgcgaagaaacagcacgccatcctcgagatagcgcgcctggcggtcgatatcgtcggcgctctcggcaaccccggcgatatcgaaaaatgcgccgcgaactgcggcatggtagtccatcatcatagctgccctgtgggttagcgaaaggataggttgattgagcaagattaatgccagtttgcgcaggcggagagccgccgcgacgtgacgccgcggcgggaaggccgggttactctttctgggcgagggcgctgaagccggcggtggcgccgacgcgctcgtcgcgggcgatccagcggtaggccgcgccgctcaggaagacgccgataaaccagctaaagttagccacttcgtgcagggccggaataaagctgatgaccagaccaatcgcgacggagggcaccagggcggcgatcgctttcgggttaaagccgttgcggtaccagtactggccttttggcgtgtcgtcgaacagatcgttaacggaaaccttgccgcgcttaatgatgtaaaagtccacgatcaggataccgaacagcgggccgataaacgcccccagcacgtcgagggtgtagtggatcagctccggcgagttaaacaggttccacggcgtcagcaaaatcgatcccacggcggcaatcatcccgccggtgcggaagctgattttctgcggcgagcagttagagaaatcgaacgccggggagacaaagttggccacgatattaatcccgatggtggcggtgatcatggtcagcaggccaatggcgaccgccaggtcgttgcccacgcggctcacggtctcaatcgggtcggtgatcatgcggccaaacagcgactgcgtgccggagacaatcaccacggtcacgatggagaacagcaggaagttaaacggcaggccccagcggttgccgcggcggatctcacccatgcttttgccgtagcgcgagaaatcgccaaagttgagcagcgggccggagaagtaggagaccaccagcgcggtggcggtgatcatctgccaggtctgctccccggcgctcagcgatttgctggcgagggtaaaggagatcccgtcaaaaccggtcttgtatacaatccatcccgccagcgccagcattaccacgtagaccgccgggccggcgatatcgataaagcgcttgatggcgttcatcccgtgccagaacaccatcgcctgcagcagccacatggtggcgaagcagagccagcccagatgcgacaggccaaggaagctggaagcggtgagcgtcgacagcgagggccagaacttcagcagcaccagcatcagcgcgttggcggcgagataggtctgaatgccgtaccacgcgaaggcgataagcccgcggatcaccgccggaatattggccccaaagacgccaaacgcctgacgacaaatgaccgcgtagggcacccccgccatctggctgggcttcgccaccaggttggcgcacagctgaacgatgcaaatccccaccagcaggcacagcagcacctgccagctcgcaagaccaagggtaaagaagctcgccgccaccacgtagcctcccatgctgtgcacgtccgacatccagaaagaaaagatgttgtaccagctccagttctggtcgcgcgtcggcgccagatcctcattgcaaagccgtgggctgtatccagcgtggggatcagcggccttaacctgatgcgtattttgttgatttggcatgaaacctgctcctgtaaatgaacacccgtttaaatggattgccgaggctgttgcaggaatcaggccaaaacagttaattttgtatgcaagaattaaattttatgtatacgattcgatatcaaaaagtgaaagtcggagtggttaatgagcaaccaacatcgtctgcaggccgcgccagagctgcaggataaagacgaatccatctatcaggcgctgatgaccgcgatcgtcgagcatcagctgccgccggggagcaaactgccggaggaggcgctggcggaggtgtttggcgtaagccgcaccgggatcagaaaagtgctgcaacgactcgcgactgtgcaaatggtcgccctgacgcccaaacgtggtgcacaggtcgccagcccaacggtcgaagaggcgcaggcgatctttcgtacccgcgcgctgctggaggtggccaacctgccggatgtgctgacccgctgccagccgccgcacctggcggcgctggaggccattatccgtcaggagcagcaggcgcatgaacgctatgacggcccggcggcgatccgctattcggccgagtttcatattcagctgcaggcgatctccggcaatcaggtgctcaccgagatggtgacccgcctgagccagcgttcatccttggttatcgcggcgtggggatcgccgtggcgtcagggctgccgctgcgacgatcacgaacagcttgtccagctgctgcgcgacaaggcgctccagcccctgagcgacgccttaagccaccattttgaacatattgtcgccagcctctgttttgagcgctctggcgtgactctgcccgattttgcccggctgtttgccggctataaggagccgtaatggccgctgtttgtatacaagtcatcaaccccaacaccagcctggctatgacggaaaccatcggtgccgccgcgcgggcggctgccgcgccgggaaccgagattctggcggtctgcccacgcgagggcgtgccgtcgatagagggccactttgatgaagccatcgccgccgtgggcgtgctggagcagatcaaagccggtcgtcaacagggggtagacgggcacgtgatcgcctgttttggcgaccccgggctgctggcggcgcgcgagctggcgcaggggccggtggtggggattgccgaagcggcgatgcatatggcgacgctggtggccacccgtttttccatcgtgaccacgctgccgcgcaccctgatcatcgcccgtcatctgctgcaccagtatggttttcatgaccactgcgccgccctgcacgccattgatttaccggtgctggcgctggaggacggcagcggtctggcgcaggagaaagtacgagcgcgctgtatccaggcgctaaaagaggacggctgcggggctatcgtgctgggctgcggcgggatggcgacgctggcccaggagctgacccgcgaactgcgcgtgccggtgatcgatggcgtcagcgcggcggtcaaaatggttgagtcgctggtggcgttaggcctgtcgaccagcaagcagggcgatttagggtttccggaagccaaggcgttgagcggcaaatttcaggcattaaatcccttttaatatgaagaggtagcagatggcatttttggcagacgattacccgcgcgatctgcgcggctacggcggacagccgccgcacgcgcggtggccgaacaatgcgcgcatcgccgtgcagtttgttctgaactacgaagagggctcggaaaaccacgtgctgcacggcgatgccggttctgagcagtttctgtccgatattatcggcgccgccagctatcctgaccggcatatgtcgatggattcgctgtatgagtacggcagccgcgccggtttctggcgcatccataatgagttcagccagcggggactgccgctgaccgtgtttggcgtcgccatggcgctggcgcgtcatcccgaggtggtcgaggcgattaagtcggcgaactatgacgtggccagccacggctggcgctggatccactaccagaatatgcctatcgagcaggagcgggagcatcttcataaagccgtgcaggtgttaaccgatctgtttggcaaaccgcccaccggctggtataccgggcgcgatagtccccatacccgccagttggtggtggagcacggcggttttgattacgacagcgactattatggcgacgatctgccgttctggagcgaggtggcctgcggcgacgggacgcgtaagccgcacctgatcgtaccttataccctcgacgccaacgatatgcgctttgccaccgcccaggggttcaataccgccgagcagttttacacctatttgaaagacagcttcgatgtgctgtacgccgagggggccagcgcgccgaagatgatgtccatcgggatgcactgccgcctgctggggcgcccgggccgcttccgcgcgctgcagcgtttccttgattatgtgcagcagcacgaccaggtttgggtctgcactcgtcagcagattgccgaccactggcgcgacgttcatccgttccgggggtaaaggcgttccccgggtcgcgccgcaagcggcttacccgggctacagctctgcaaacggccgcaatccggtagcccggacagatgcgcagcatcgcctccgggaaatgacgccatcctgcgctatgtccccgggggcggcgccgggcgcccgcccgggctacgggttcatcaccctctgcggatccgtagcccgggtaagcgcagcgcaacccgggggataccgggaaaggcgcgaggcttaactcatcaaactcacctgggcggcgacgatgcgccagccgcaggggaagcgcacccaggtttgctgctgtcggccaatgcgttcgctgccctggcgggtgaattcggtgctgcacaccgcgtaatcctcgccgaaggtggtgatggtggtgtgccgcagcgcgcgctgcaggccggcggccgggcgggcggcgcgaaaggcgcggatttcgtcgataccgtagagattttccccggcccccagccgcaccgtgcgcttatcgtgccagaacagctcatccagcaccgcgatatcgttgctcaccagcgcttcctcatagcggtaaaacgccgccgtcacctcggcgagaaccaacgggcgattaatctgctcttgcgtcatcatgctgctatctccaccgggcgggcgtcggtaatgcccatttcctccagcgcccgcgccgcgcgcagacaggcttgttcattaaaaggcgcggcaatcagctgcaggccaatcggctgaccgttcgccgtacgcagcggcacggtgaccaccggcaggccaaggaaggagatgggctgggtcagcatccccatgctggcgcgaatcggcagcggctggccgttaatctccatggtctgcgcgccgatgagcgtcgcgctgcacggcgtggccggggcgatcagcacatccgcatgggcgaacagggctttaaacgcctgctgcgcgtggcggcggaagcgctgggcctgaagataccaggccgacgggatcatcgcgcccgccagcaggcgctcgcgggagttcggctcaaaacgttcgggctggctacgcagcgcgggcaggtactgatttccgccctcggcggcgctgataataaacgccgccgagcgggccagctccgcctccgggaaaatcacagcctcatgcgccgccagcgccccggcgacgcgagcgacggccgcacgggcgtcgttatcgcaccatgtcgtaaaataaccgccgagggtggcgcagcgcaggccttcgagcccgcgcgacagcagattcgccgtgcgctcgctggccttgtcggcctgaaaaccatcgcccggatcgcgaccctgcagcgcatcgtaaaccgcggaaaggtcgctgacgcagcgggcaaacggaccgatatggtcgaggctggcgacgaaaggatggctgccggagcgcgataaccggccaaaggtcggcttgaggccgaagatcccgcacagcgaggccgggacgcgaatggagccgttggtatcgctgcccagcgagaaattcaccagcccggcggccaccgccgccgccgacccgcccgaggagccgcctgcgatccgcgaaagatcgtgcgggttacgcgtcgccccgtagtggctgttctcggtggtaaaaccgtaggcgtaggcatccatattcagcatcccggagagcagcgcgcccgcgctatgtagctggcgcaccgcccagctgtcggcggcggcggcggggcgatcgctcagcagctgcgccccggcaagggtggtatggccggcgacatcgaacagatttttcaccgcgtagggaacgcctgccagcgcgggcaggggctttttttcccgccgcagggtatcgatattctctgcctcagcgagcatgcgcttttcgctgacgtgggtccaggcgttgatctgcgggttaacgcgggcgatgttctccagggtgtggcgggcgatctctttggcgctgagctcgccggcggccagcgcgcgctggatttcgtgaatcgtcatttcaggtagcttcatgctttatagactccggcgatttcgacgcgatcgtcgaggggaaaggccagcagcggcccggccatggcggcgatgcggctaaactgcaccctgagctctgcgcgccgcgcatcgtccagctccagcgccagcagctgttccatttgtgtgaggtaagcgtcccattcgttgtgcggtgtgttcatcatcagctcctaatagccggcggcggagccgttgctgcgcggatcgctggccccctcaaacaggccgttgggatggcgtacaatcgccccggcgtggcccatggcttcgctaaaatcggccagcacgtcaacgtcgtgccccagctgacgcaggcgggcaacgctttcggcgctgaagcggccctccagcttgagcgagtcggaagtctgcccccaggtgcgccccagcagccagcgcggccgggtgatgctctcctgtagcggcacgttttgcatgacgtagcgggtgaaaatagcggcctgagtttgcggctggccgtcgccgcccatggatccgtacaccatcacccggccatcgttcagccttgcggcggcggggttgagggtgtgaaacggctgcttgccgggcgccagcgccagcaggtggcgcgggtcgaggctgaacgatgccccgcggttctgccagacaatgccgctttccggcagcaccacgccgctgccgaactcgtggtacaggctttggataaaggaaaccgccagcccgcttttatcgataacccccatccacacggtgtcgcccgggcctttgcccgcgccccacggggccgcccgctggtcgtcgatattctccgccagcggctgcagcgccgccggcgtcagcaggctctggatatcgacatcaaggtggcggggatcggtgatatgcgcgtcgcgcaggccgaaggccagcttggtcgcctccacaattcggtggacggtcatcgcatcgtcggcatcggccatcgccagcctgtcggtgatgccgaggatcgccagcgaaaccagcccctgggtcggcggcgcgaggttccacagttcgccgtgccggtgcgccagcctgagcggctgggggcggcgagcgcgatgctgctgcaggtcgctaagggtgacgggcagcccgtacttttccataccgcgggccagctgctccgccagcggcccgcgatagaagctgtctaaaccgtcttcggttaatcggcgcagggtgttcgccagcgccggctgcaaaaagcggctcccggccttcggcggctggccgtccaccagaaaggtttcggcgaagccgggctggtcgcgcagttcgctgaatttatcggcggtcgcgctggcctgcgaggcggtcaccgggataccgccggcggcgtagccgatggcatcttccagcagacgcgtcagcggcagcgatttcccggttaactcccgcgaaaccttaagcgcttcgtcccagccgctgacggtgcccgccacggtcagggccgcctgcggtccgcggtgggggatctgcgcgaggccggcgtaggcctgcggcgtcgccagcgaccccgccgcgccgctggcgtcaatggcgatgggatcgccctcggtgggcacgataagccagaagccatcgccgccgaggccgttcatatgcgggtaaaccacggcgatggtcgcagcggcggcgaccatcgcttctatggcgcttccgccttcgcgcagaatcgccagcgcgctctggctggccagatgatggggcgcaaccgccatcccgcgggcggcaacatgactttgcatggggtgtcctcaattaagcgaaatgtccgcagagggttgcaaaagctgttccatgtctgaacgtaaagtttcaatcgttgccgacgatgcgcgttttttgccgaactggcatgcattatgaaaggcgttagcggtatagtgcggtgaaacgaaagttacagaggtcttatgcaacagcttgatgaacgactgaaagagcagtacccgtcattatcaccccaggagcagcgggtggcggattttattttcgatcattttgatgacctgattagctacaacagcgccgagctggcgcagctgagcggcgtatcgaaagccacggtcagccggctgttcaagcgcctgggctatgaaaaatataaagatatgcgcgatgagctgcgcaccctgcgccagagcggaatgccgctgaccgataatcgcgatgcggtacagggcaatactctgctggcgcgccactataaacaagagatggccaacctgacacaatgggttaacgcgctggatgttcagcagttcgccgaggcgattcaggcgctggtcgccgcccggcgtattgtgattgtcggcatgcgtaatgcttatcctgcggcgctgcatctgcgtcagcagctactgcaggcgcgcgggcaggtactggtgctgccgcagcccggacaaagcctgagcgaggaactggtggatctcagcgccgacgatctggtggtggtgatggcgttccgccgccgcccgcgaattattcgcccgctgctgctgcagctgcagagcagcggcattccggcgctgctgatgtgcgagccgcaggcccacggcctgtttccgctggcgcgctggcggctctgcgcaccgctggatagcgtatcggcctacgacagctacgcctcggtcaatagcctgatcaatctgctgtcgaacgcctttctgcacgaaattctcgataaaggccgcccgcgcattcacgacatcgccaccctttatcagcagctggacgagctggaacaacgataatggggcgccagcgtggtgctttgcatggttttggtgcgataaaataatgggggaacgcgcggtcgttccctcttaattcctcaatttcccttgttttacgttcgcttagccaagcggcgggctaacccgatgcgcggcgctttatctggcacattagttgcaaaagtgacttcaaagaatcttttgtttcatgctaacgtaacgggtaaacatcatgaagaaactgttgatcgcactggccggggccgcttgtctgttaaccaacctcccggcggcgaaagctgaccagctccaggatattgaaaagcgcggcacgatccgcattgcggtgccgcaggatttcccgccgtttggctcggtgggtaccgaccttcagccgcagggctacgacatcgatatggcgcgctatctcgccaaagagatgaagctcaagctgcagctggtgccggtgaccagcgccaaccgcgtgccttatctgcaaaccgataaggtggacctggtgatttccagcctcggtaaaaacgccgagcgcgaaaaggtgatcgactttagccgcgcctatgcgccgttcttcctcggcgtatttggcccgaaaggcgcggagctgaaagacccggcggcgctgagcggtaaaagcgtgggcgtgacccgcggcgcggtggaagatatggtgctgaccagcgtggcgccgaaagaggcgcagattaagcgctacgaagataacaacaccatgctgtcggcctatttatctggccaggtgcagtatgtggccaccggcaacctggtggtggcggccatctcccggcagaacgctgacaaggccccggtgccgagctttatgctgaaggattcgccgtgctttatcggcctgaaaaagaatcaaccggccctgaaggcgaaagtggatgcgctgattgagcagggcgtaaaagacggcaccctgaacggtttgtctgagaagtggctgaaagcgccgctgcctgccagcctcggcgcgtaaggtccgggcatgacggagcaacttcatttttctgcgctctggccgcactggccggagctgctggcggggctgtgggtgaccattcagctgacggtgctggcgacgataggtggcctgacgattggcatcttcggcgccgccatccgcagcgggcgtcccacgtggttcagccggatttggggcgggtatgtcgaactgattcgcaacacgccgtttgtggtacagctgttttttatcgtcttcggcttaccgaacctggggctgaagatgacggcgggcgaggccgcgctgctggcgatggtggtcaatcttggggcctacagtaccgagatcgtacgcgccgggattcaggtgacgccgaaaggtcagtgggaagcggggcgcgtactggggctgacccggacgcagacctttattcaggtcattctgccgcccgcgctgcagcgcatttatccggcgctggtgagccagtgcatcatcgtcatgctcggttcgtcggtggtgtcgcaggtctcttatgaagagctgacctttgccgctaacctgattcagtcgcgcaccttcctcagttttgaggtctatctggtgacgacggggatttatttagcgctgtcgataacgatgcgtcagctgctgatggcggcgggacgtaaatggctgggggtgcaggcatgatgaccacctttaccgattgggacattgtccgcaatctgctgctggccgggcgctggacggtgctgctgtcgctggtggcgtttctcggcggcgcgctggtcacgctgccgctcctgctgctgcgcatgaccggcgggcgtcaggtaaaacgcctgatccgcggctatgtcgaactgtttcaggggacgccgctgctgatgcagctgtttctcgcctttttcggcgtggcgctgttcggcatcgacgtttcggcgtggaccgcggcgtcgctggcgctgacgctgtataccagcgcctttttgctcgatatctggtttggcagcatccgcgccctgccaaaagggcagtgggaagcctcgcgctgtctggggctgagctttggccagacgctgtatcgggtcgtcgccccgcaggcgctgcggatcgccatcgccccgacggtggggtttgccgtgcaggtgatcaagggtaccgcgctggcgtcgattatcggcttcgtcgagctgaccaaagcgggaacaatgctgaccaacgtgacgtatcagccgtttaaagtctttgcgctggtggcgctgggctatttcattctgtgttacccgctgtcccgctacagccgtcatctggagaacaaattcaatgcctctcatcaccattaatcagatgcagaagtactacggcgataaccacgtgctcaagggcgtcgatctggatatcgatatgggcgaagtgatctcgattatcggccgcagcgggtcgggcaaaagcacgctgctgcgctgtatcaacggcctggaaggctatcaggaaggcagcattaagctcggcgggatgaccattaccgaccgcgactcgcaggcgcgggagatcagccgctctatcggcatggtgttccagagttttaacctgtttccgcatatgacggcgctggaaaacgtgatgctggcgccgcgtcgggtgctgaagaagagcgccgccgagtgccgtgaactggcccagcggatgctggaaaaggtcggattgggcgaccggctcgattactacccgtcgagtctctccggcggccagcagcagcgcgtggcgattgcccgcgcgctggcgatgtcgccaaaagttttactctgtgacgagatcacctcggcgctggatccggagctggttggcgaagtgcttaaggtgctggagcagctggcggcggagggcatgacgctgattctcgtgacccatgaaatgaattttgcccgcgaagtgggcgaccgcgtcgtgtttatgcatcagggacgcgtctgggagcagggcgacagcaaaacgctgttcgccaacccgcagaccagcgaactgaagcagtttatttcctccgtgcgcggcctcaatcaataaggacttaaagatggatatcactcagtttccgcaactcaacccgccgtcgcgcctgctgatggggcccggcccgattaacgccgacccgcgcgtgctgcgcgccatgtcgagccagctgatcggccagtacgacccggcgatgacccactatatgaacgaagtgatggcgctgtaccgcggcgtatttcgtaccgaaaaccgctggacgatgctggtggacggaacctcaagggccgggattgaggcgatcctggtttcggctattcggccgggggacaaggtgctggtgccggtgtttggccgcttcggccatctgctgtgcgaaatcgcccgccgctgccgggcggaagtgcacaccattgaagtaccctggggtgaggtgtttaccccggaccaggtggaggatgccatcaaacgtattcgtccgcgcctgctgctgacggtgcagggcgacacctccaccacgatgctgcagccgctggcggagctgggggatatctgccgccgctatgacgtactgttttacaccgacgccaccgcttcgctgggcggcaacccgctggaaaccgacgcctgggggctggatgcggtctcggccgggatgcagaagtgcctcggcggcccgtccggcacctcgccgattaccctcagcgcgcgcatggaagaggcgattcgccgccgcaaatgcgtggaagaggggattcgcaccgatgcccaccgcgacggcgacgaggagatgatctactccaactatttcgatctcggcatggtgatggactactgggggccggagcgccttaaccatcataccgaggccaccaccgcgctgttcggcgcccgcgaatgcgcacggctgatcctccaggaggggctggataacggcattgcccgccataagctgcacggcgacgcgctggtcaaaggcattcaggcgatggggctggagaccttcggcgacctgaaacataagatgaacaacgtgcttggcgtcgttatcccgcagggtatcaacggcgaccaggcgcgcaagctgatgctggaagatttcggtattgaaatcggtacctcgttcggcccgctgcacggcaaagtgtggcggatcggcaccatgggctacaacgcgcgtaaagactgcgtgatgaccacgctcagcgcgctggagtcggtgctgaactatctcaaattccccaccactcagggcgcggcgatgcaggccgcgtgggatcactatcgcagcgagagcgcccaatgagtccagcacaacgccagcaggcggaaatgcagcaggccgcggcgcgggtgatggcccgcgccgatgagctggccgcgatcagcgaaacgccggatgccctgacccgggtttatctctccccacagcatctcgaggccaaccagcgggcggcgcggtggatgacccaggccggaatgaccgtctggcaggacagcgtcggcaatatttgcggccgctacgagggagagcaggagggagcgcccgccatcctgctcgggtcgcaccttgatacggtgcgcaacgccgggcgctacgacgggatgctcggcgtactcacggcgatcgaagtggtgcacggtctgcatcaacaggggcggcggctgaaacaggccatcgagattgtcggcttttgcgatgaagaggggacgcgctttggtattacgctgctcggcagccgcgggataaccggtacctggcccgagagctggctggcgcagaccgatgccgacggcgtcagcgtggcgcaggcgatggtgctggcggggctggatccggcgcgcattcatcttgccgcccgccgcccggaggagattgccgcctacctggaactgcatatcgagcaggggccgtgcctcgagcaggaagggctggcgctgggggtggtcgaggcgatcaacggcgcgcgtcgcctgaactgccgctttaccggcgaggcgggacacgccgggaccgtgccgatgagtcatcgcaaagatgcgctggtcgccgccgccgagtggatggtgcgggtagagaccctgacccgcgagcagggcggaaaccgggtcgccacggtgggtacgctgcgctgcgcgcccggcgcggttaacgtgatacccggcgacgttacgctgaccctggatattcgcgggccgcacgaccagccgctggatgcgctactggatacgctgctgaatgaggcgcaggccattgcttctcgtcgccagctgcggttcagcgccgaagagttttaccgtattgccgccaccgcctgcgatagcggattgcagcaggtactgagcgaggcggtgcaggcggtgcaggggcgttcgttgacgctgccgagcggcgccgggcatgatgccatcgccatggccgaacgctggccgtcagcgatgctatttgtgcgctgcaaaggcggcatcagtcatcatcccgccgagtcggtcaccgccgacgatgtggcgctggcgatagcggcctattcgcgcgcggtgtcggcgttggatgccgggaagtagcggctatcgtttcgcttctggtaaaccgggcatagcgcaacccccaccacggtgggggctgttttatcttttgccgttcggtttaagctgttcgccgggtctgagcctgaacagctcgtcatctcgggtggagtagcgaaccgtcccgtcagccagccgataagcaccctcggtgaatcccgcgccgttcaggaacggcgccaccgcgtccggcgtgttgcggaaggcggcttccagggcgagaagcgcatagggggcaatactatcgatactggcatattcggcctcaggatcatcgacaaaaaagccgttgaggcgctgcttgttgatgatgtttgcgccgatgcgatccgccagcgtcaaatagtcctgctgcccggtggcctgccacaggtcgataagcgcgaaaatcgcatacggctgatggttctccgtttggctattcagcctgcggtttgcgccgccgggttcaccgatatcgcctaaaccctggcctttcgcgatgccgcgggcgactttccagatggcacgatccggttcaagcgtccaggcgcgggcgtaggagagaagaaattcatttcccgccggataggctttgagcaccgtgccttttttcccataatagccatcgcgttttaacacgtagccggagagatccgtaccgttggccagcatcgggcggaaggtattgttctgctcatcgtaagcgtaggtcgcgaaggccttgaggccatcaagggtccattttttgagatcgtcaccgtctttgccgagcgattttgccagggcaagctgcatcagcgcattttctgagtagagcgtgctggtccggcccttcagcagcatattgccctccagcgcgtccgggcccagttcggggccaaactgacgctgcgcgcggtcgccgtatttcgaatgcgtgtcgctgtcatcggtggtgtcagcgcgttttagcggttgggtaaactggtagacgcccagtccggtcttcttatctcgcggcagaacgtactgttcggccagaagcttcgcccacgtcagcgcgccagcgtcaccatcgtattgatagagcagcgatgcggagtagataaggtcgttgccggcattgagaaagctcaggcccttggtggcgaaaaagggcggctgttggacaaaatcactttgccagagcgcgcccatcgctttgccgtactccccgtgacggctggtttccagcgttttccagtcgtaaacatgagcgttccagaaagccttgataaagcgcgcggtggccttgtcatcgacggcaaacatcatgtcgtaatagggatacgcgttcttaagttcatggaccatctccttttcgctcgggccttgaggctgcagcgttttcaaatcaacaaagcgatggcctccccacagcagtagcccgctggcgtcctgatagtggtcaaagtagtagcgaatattctccgcgacccgctgcttatattttgcttcgccggtcaggttgcttaaccctaccagcacccgcatcaagttttgctgggccgagaagttcgacagcacggtcactttaccgtccggaaagacccattccatttgcttgccggtgcgaggatccacgccattggccagcagaggagagtgatggccgtaccgatctcccgctttatccagcacgacgtcagcgaactgctttacgctgctcaggcgcgcgttctcctgggcgccagcactcagtgagaagagactcagagcgcccaatgccagggtgatttttgcaatcttcattattatcctcttaatgaaaataagggtttaataaaacccttatttattatctggctgacaggaagttatcagaaggagtatttcacaccaacgcgataacgcgtttggcgttcatcggtggttttactgccggaaacgttgccgatggccatataaggagaccagtttttatcaaatttataggttagcttaaaatcatgggtccagtcatagctttcgttatccgctaaaataacccccgcggagttggcttttttatagtccagttcataatcgagctgataatctttgaggaatttccaggaaagaacgctggtcagattatagccgttctccgaggtgtctttagacgtgccgatattgcctgaattgcgcttgtagtaaggtcggtagcgcaatgaggcgctgacatcgtcggtcagattcgctttaccgcgcaggtagggacgatagttgtttgaggacgaactggtatccagagagaagccgggctcaatctggaaggttttatttattttatgcacatagctcgccaccacttcggtgccgttactgacggtttcatcataggctttatttttatcctgcgaacctttccatttcccttccagcgacaggccaaagccattggcaaaacggtgagacatcagcagtctgtctttatgattattgccggctttgtcattggtttcatgacgataatcaaatgtcaccgcgtgggcagcaatactgataaaagggatcgtgactaataataaggaacgaaacatagggtgcctctactttttttattttccaaaggtacaagaaattacctgccgtaaagcaggcagaacgatacaaatgaaattattagatggtagtgtggtgccgggtgcctcccggtgaatcaggcgctgacttcctgattcgtctataaaaacgaaacgtcgatgagggcattcctcaattcagcatgaccccgccgcttagggggattcaccacacattattctttattccctggtgatgactaattagtactgtctgtaattttattgaaaattacttttacacaaaatgaaatggtgttttgagatcgagatctgaatattaaaaatagagggtaaatattttttatgtcatttataaagataatcctaataattaattattcttttaaatcagcttgttgagtggtttctttgggtttattttgcgtttttatttgcgaatataaggattttttgtgaattgacggtaatcttattcctatatttttaagcgctcagtttgttaaaagttaaaaatagttcgatggtttcaatggttaaaccgaagccagtactgccaatccctttaagctaaacgaaagctaaacggaaaagagggcggtattgatctgccagactgacgacataacactctcagaaaagcatccatatggaaggataataaaagacggtaacctcgggacttcaagatgactattcatggaaaggatcgtgtatttatttctggcgttgagaatatagtgcaggagctgagcgatggcgcggatgccgggttaagcaactgcgtgtatgtcacctgcgggatggatatccaggagatatatgctttgttctttcgccatccgccggagcactacgccatcttcatcacctctgagcgccattttgagaccatcaaccggctgtttccgggcctgttaaagctctgtttgtcagagaggttgacggtcgaagagctgcgtcaggcgttaaaagtgatgggcctgttatcggcccagaaccagagcgttgcttatctgcccgatacgtttaattttacccatgccgagcaacagatcatgaggctcagtttacgcggccattctctggatgatattgcccgtatccgcggggtcagcccgtccacggtcagcgtccagcgtacccggctgatgaagcgcatgggaaccaaaagcctgcaggagctctgctccctctatgcggctatgcgtaccagcgctttctgaataaacgcagggctggaatctggcgaaatttgagatattattctgagccattgtactagtttaaaggttcaaagtgatgacgttttccacccttgccgatgtcagaagccagatcgattcgattgatagcgaactggttagcctgattgctcaacgtgctgagtgcgttaaagccgctgccgcattcaaaactgaccactccgccgttcgtgctcccgcgcgcgtgcagcaggttattgatcgggttcgcgaaaaggcggctgccgcagggttacccgaagtgattattgagaaagtgtatcggtccatgatagacgcctttattgagtatgagcttgagcaacataatcagctacagcggcaaaaaagtaacggtgtgttgggtgagtgacccacacgatattctcctggcgcgcagggtcagttagcctcattctgactccccgacgggctgctaagctattatccccacgctctgatagccagtgccgcgctatagagcccgaatccccaggccagatgtgtgagcacgcttagcaagcgagccagccacgggtgaggtgtttgcgatgccgcaatgccgaagcccaatgcgggctgaagtacgctgcacgcagccggagcataggcattgtgaagagtttaaaaggattgtggcgagagagctgaggctggtcagctaattaagaaccttatactttgacgagagcataatgatggaaaaaaattttacgcctgagcaaatcgaaatcattaatcgcgtggtttttgcgcgtatcgagcatatgaaagagaaagtgattgaaaccattgagcagacagagcgcgatgcgcaccagcagctggtggattgcgggattgatatgaccgatttctgtccggctaatcagcactttctcatgatgacaatcgtccaggcgctgatagatcgggtgcacgggagcgacagggcgcttgcccggaagataataaccatggaggcgaagagactgaacgtcagcgttaacgtcgaggcagatagttcgagataaccttaaggctgagtctgcggcggaccaggaaatccgcgcccgtcgcccggcatcgcacctttacagttcgcgcaaacgctctgcgctgttatgctaaaaacccggcaagccgcgctgtaatgagacctgaccatgcccgaacgcgaaaaaaacatccatattcaaccctgttcttctatctctcgaacgcatattcttccggcactgctggcgattgtcgccgtatcgagcctgtgcgcgttcgtctcgccgccgctggggccgtggcgcgaaattttgaccaatccagggatgtatatcgatctgctggcgctgctatttctgctgtttatgctctggagttcgaccaaggtgcggatgaaccacgtggcggttaactgggtacgctacggcctgctgctgtggattgccgggggcactttcgatctgatggacgaaatattccaccagccgcgctggatggggtactactgcgaagatctgctgcgcctgtccggcatgctgctgagcgcggtcggggtctacaaaattattgagcgcatcaatctcctgtacgtcgacgcgcgttcgcaatcgctcaaggatgagctgacccagctgcccaaccgtcgcttttttatcgacaccatccgcgagaaggaggggcgcaggctggcgctgatgattgtggatatcgactacttcaagaaaattaatgacacctggggacatctggtgggggacgaagtgctgtttgcccttggcaaacagctggcgaagcttaccagcgataaggtgttgccttcgaggattggcggagaagagtttgccattattgtcgatggcctgtcggcgcaggaagtggatgaactggcgcagtcgattttgcaaaacgcccgcgcgatcctgatcaaccacgataacccgctgtcgatcagcattggcgtcggtctgcgccataaagacgagccgcagaacctgtttattaaaaaggtcgatgacgcgctctataaggcgaaaaataacggccgcggacgggttgaatgggccgcgtgaactatccctgctgcgcgctgcggcagtggcgacgatattcggaaggcgagcgctcggtgtagcgtttaaacacccggcagaaatagttgctgtcgacaaaaccgcagttgtgggcgatctctttgaccttaagatcgtagccgcgcagcagctttttcgccttttccaggcggacgctggtgagaaactcattaaaaccgacggagccggatttctggaatatatgcgacaggtagttgggcgtaatatgaaaacgcttcgctaccgactcgcgggtcagcggctgggtgagatgctcttcgagataatcctgtaccgccagaaacagatcgcggctgcggctgacgcgcatctccagcccgaccagctgctcaaggcagtggctcaacagggccgcgaccaccagcctggcggttaccgggtccggctgcaggcagatttcattgagcgacagcagcaggtaggagcccacgcgcggtccgaggcgggcgacgttctgcttttccgtgcgcagctgcttgccgtcccagtgctgaacgcaaaacccgagcttctggcgaccaaacagaatgcttaacgtcgacgccggcgcggtccattccggcagcgtccatttacccgcctgaacgtagagcacctgcgaggcggagagcatcgtctccgacagcggcagcccgctctccttaagctcaccctcaagcacaatttccagccgtggaaagggcaccttaaacgccagcgcgggctcggagatatccgggtcggggaacctgacgtgcagattatctttctgatttactaaacgatttaaaatatccgccagatcgtcaatcattccgtatgccttagaagagagcaattatcctgttgattataatctattttatctgcacaggtttgttctgtatcaggcgacttcgctaatgcctgccctgcaggaagggggaaaaagctggattttgatggccatcacacttttccctgccgcgtacgctcgtccagtttttcgtagttttgccctcatgtattcccgcccgccgccgattagagtttgttttgtgttatcgataagttaaggaatataaatatggaacaacaatctgcggtttatctggatgcgctgggggcgaacgttgcgctgagcccggcaatgaaacaggagctggataccctgggctacaccgttgtgcataacgtggcggacgcggagtggctggcggcgatgcgcgcgcttatcgacgccatcgtcgagagagagggcgataatctggcgatcgagcaccaccaggaagcgacggcaacccgcatcgccaacctgattaacaaaggcgcgatttgggaaaaggtctggtcccatccgctgattctctccgcctgtcggcatgtttttcagggggattttaaagtctccagcctgaacgcgcgggaagcgttgttcaacggcggccatcagccgctgcatgcggactggaaaaagccgcgtcacgattttccgaaagtgcatctggtgaataccatctgggctatcgatgatctgagcgctgacaacggcgcgccgcgcattattcccggcacccatttgcgtccggagctgccggaagaggtgctggatgacccggagctggcgcatcctgatgaggtggtgttcgccgcgccggcgggcagcgtgatgatttataacgcccacgcctggcacggcgggacgcgcaaccgcgtcggcagcagaaggcgcgtgctgcacggtttatatatcgacagggcggataccgcgcagcaggatcagcagcgctggctgacgccggaaaccgccagccgcctgacgcccgcgcagaaatggctgctgggggtggcgtaaaaatcgcatggaatggtagccccggtaagcgcagcgcgaccgggggaagtctgagcgggcgcggtgttatttccccgggccgcggcgcaagcgccttgcccgggctacaaaacggcaaacggcggtgaacctgtagccccggtaagcgcagcgcgaccgggggaagtctgagcgggcgcggtgctatttccccgggccgcgggcaagcgccttgcccgggcggcaaaatcaccggtgtactcacgggatctcaagataaaccaccggctttttcataatgcatttcaccgcgtcgacaatctgctgcggctgcagcagaaaggttttgatgctggtcttaatggtgcggatgccgctaaagcgtccggcatcgtcaatttcaatatccgtcaccagcagaacgacatcggcatgggcgatgtcgtcggccattattttgttctccacccccagcgcgccctgggtttcaattttgatattccatttctcctggtggccgactttttccagccgctcggccgccatataggtgtgagcgacgccgctgacgcaggccgtgacggcaacgatagtgaaatccatagcatcctcctggcgttatccgccgacggtcacgctaaaaccggcccgttcggccagcgtcctgaatggctgaatctcagattctgcaggggctttaatcatcgacatcgaccatttttttcccagtaagtgatatttggcttcgccgtactgatggaacggcagaagatgaatttccggcagcttaaagggggccaaaaatgccagaatccggcggaaattcgcttcatcaagcgtgaatcccggaatcagcggcacccgggggatcacgtgaatatgcgcttctaccagacgggtaaagttatccagcacccgcggcatattcatccgcagctgctcgcgggccagcgtttcatccatgatttttagatcgaatagcacttcatcgcaggcctgcgccagcggaaaaaagcggcggtaggcggtatcgcccgccgtttcaatcgccgttctgatcccccattcgcgcaggcggcgcagcaggcgcgcggcgaattcggcctgcatcaggacttcgccgcccgacagggtcacgccgccgccggaggcgcggaagaagacctcatccttcagcacctctttaagcagattatcgagggtgacgtcgcggccaatctgctgccacgcgccggaagggcactcgaccacgtcctgctggcagcgggagcagcgcaggcacttgctctcccggcgtacggtctgaatttgcggcgagatcgactccggattggcgcaccagggacaggtatgcgggcagcctttaaaaaacacgacggtgcggatcccctgaccgtcattcaaagagtagcgctggatattaaaaatgcgcgccttatcggcgcgcgtttccaggacctcacagctgatgcgcggtgcggcggataatgtcatcctgaatctcctgcgacagctcgacgaaaaaggcgctgtagcccgcaacgcgcaccaccagacctgcaaaatcctgcggccgctgctgggcttcgcgcagcgtatcggcgttgaccacgttgaactgaatatgctgcagcttcagcctggtgaatgcctgcaggaagtcggccagcttattgaggccgccgtcgccggcaagggtcgccggggtgaatttgacgttcagcagcgtaccgttggagagcagaaagttatccagcttgctgaccgacttaagcaccgcggtcggcccctgcacgtcctggccgagcatcggcgacagcccgccgtccgccagctgctctccggccaggcgtccgtccggagtggcgccgacgaccgagccgagcggcacgtgggcagagacggtataggagcccggcgtaaagcgaccgccgcgcgggttgcggtactgctctacctctttgcagtagaagcgcagcagatcggcgctgatgttgtccacttcgtcaatatcgttgccgtatttctcgaagcggttgatcaggcgcgcgcggattttttccccttccggcgtctggaagttggctttcagcaccgcgatcagttcagcgaagctgagtcgtttttgctcaaacaccatccctttaagcgcgtgcagcgagtcgctgaggttagcgatgccgatgccctggaccccggagaagttatagcgcgcgccgccttcggtgatatcctggccgtgctgcacgcaatcctcaataaaggaagagagcaggggaaccggcgcccagtcgcggtggccgatatcgcaaatattgctgccttcgaccatcagcttaatgtaatagcgaatcttgtcgcggatctggtcgatcagcccatcccaggtgatgtcagggttgctttcgttttccagcatcacgatttccatcaccttcagcagattgaacatggcgatatcgtgcaggccgtaggtgcgccccgggatcgacagctcaacgcagccaaccaccgagtaatcccgcgcgtcatccagcgagacgccgcggttaagaaacgccgggatcaccacttcatcattgaagatttgcggaatgccggtgccgaggcgaatggtctcggcggttttgcgcagaaaagggcgatcgaccagctcgttgacccgcacgccgaggttcggctgcggcaggcgaacgttctggtaggcgtcgagggataaaaacgacaggatattgaccgcgctgcgtccggtctcggtcaggccgccgagcagggcggtatagccggtcgggaagcccgcgaagtagcgcgcgctgctggtggagcgcagcaggacaatatcgttgcacttcacccacagcgactccagcagctcctgaagaaactgcggatcctggccgcgattcagcgaaacctgatagtacggcagcatgtactggtcaaagcggcccagcgaaatggagctggcgttggattcatactgcaaaatgatgttcatataccagaagagctggcaggcctgccagaaatcttccgggcggtgcaccgcgttatggcgggagatgtccgcgatggtctccagctctttgcgccgctgcccgtcgctgcagccggcggccatgtcatcggcaagcgccgcatagcgcagaatatggcgctgggaggcttccagcaggatcagcaccgcctgataaaaattgttctgcgggtgccgctgactcaccgctttcatctccgccaccagcgcggcgaggccgttttccagcagacgagggtagtcgatgatgatatgtccctggcctttatcggtctggttgatgctaaaaatctgcgtgctaacggcggccttcacttcatcggtcatctgggcgttgatgaagtccttcatcgagcgattttcccagtaggggaacagcacttcgcggtagatgcgtttatcttcttcgctgatgttgaagcggtcctgcgggcgggtcgggaactggtccagctccttgagcagccagtagggatccatctccggcgacatgatcccggcgcgcggcttgatcgtacggttgccggcaatcagttcatcatcacgaatcgaaatctgcacatgatcgaggacccatgcggtcgctttcgcccggcggatcatcaccggctccccctcggtctgtttatggctggcggtgtagagcagcgctcgctcgagggagatttcgcgcgggttggcgaacagacgatcttttaagcgttgagtgcgattagtcatgacaagctccatgttattttgcggggcgcaggccgcgccccgtgcattcagtcaggcattctgcgaaaggtggctgtcgattttgttcataatggcttcggcgcgcttcacggcgtcgctgatgttgacgcgcacgatggttttaccggcaaaacgctcttcaaacttgatgccgatatctttggtcagaatcaccatatcggcgctggcgacgtcttctgcggtcagctcgttctcaatgccgatggagccctgggtctcgactttgacctgccagcctttggccttagcggcgctctccagcgattcggcggccatataggtgtgggcgacgccagacgggcaagcggtaacggcgataattttggtcatacaatattccttcccgtgtctcagttaatttcgaaatcaagatccatctcgtcatcggctttggcgtcagacgttttctttttcgccagggccttaagcaggatgacgcaggcggcgctgacgatggcgccaaccgcgaggccggcaataaatccgcctttaccctcaacgaccggcagaacgataagcccgccccagccggcatagcactgggcgccgagcagcgcggcggtaacgcagccggcggcggcgccgatcatattggccgggataacgcgcagcgggtcggcggcggcgaaggggatcgcgccttcggtcacgccaacgcagcccatcaccagcgcggccttaccggtttcgcgctcttccgcggagaagtatttacgtccaatcagcgttgccaggcccatgcccagcggcggcacggcgataccgacggcggcgatggccaccacgctgtaaacgccctgggaaacgcaaatcagcatgaaggcgtaggcgaccttattcaccggaccgcccatgtcgaaggccagcatcaggcccatgatgatggcgagaatcacgatgctgccttcgcgcatgccctgcagccagccggtcaggctggcggtgagcgcgccaatcggctcgccgaggccccacatcatgatcccggcggtaataaaggtgccgataatcgggataacgaagatgggcatcaccgagcgcagcaccttgtgcaccgggattttcttcaggtagtagaccaccagcccgccaataatcccggcaattagcgcgccgaagaaaccggcgccgaagctgttgccgacccaggcgccgatggcgcagggagccagcgccgcgcggtcggagatggagtagccgatataggccgccagaaacggcaccataagcgtcaggccggccacgccgatatcaaacagttttttcaggttagggtcggtggcggcatcgggcaccgcgcccttgccgtacaacatgacggagactgccagcaagatccctccggacacgacaaacgggatcatatgtgaaaccccggtcatgaggtgctggcgggtattttttaatatttgcaccagttcattcattgttattctcctgagcgctgcgtggcccgtgactgagttgatgcttcaaccttagaaaaagggcggcgcataaaatagtagagaaaaagtgcatttactggatatttgtaaggccagaggaaaattgcgatccacctcaaatcttagcgctggtgggtttttggcgccgttagtcaggcgatttgtgaccgcgagcataaaaaagagtcgggcatacaattatccagtaattgccacttttatcgtgtagtggcgggccggttctttctttaccttttggctaaatacgcattattcaggaggaaggcgatggctctggtaattgaattcatatgtgatttgcccaacggcgtgcatgcgcgtccggcaagcctggtagaaaccctgtgcaatactttttcgtcttcggtcgaatggttaaatacccgcacggaaggacgcggaaacgcgaaaagcgcgctggcgattatcggcaccaataccttgaagggggaccgctgccagctggtcgtcagcggtgaagatgaacagcaggcgtttgatgcgctgtcggcatttatcagcgaggagttcccgcactgcgatgcgccgctgccgacggcggaatccatggacgttcagccggttcctgaatccctctcgcgcctcaatcccacgctgtttcacgcccagccggtctgcgccggcagcgcgggcggcaggctcacccatcttaaatccctcgacctgcgcgattcaggcgcgctgcccgcagcgggcgcaattgaacaggaacaggcggcgctggacaggggcctgaccctgctggtgaaaaatattgagttccgcctgctggataacgacgggaccgccagcgcgatccttgaggcgcatcgctctctggccaccgacgcctcgctgcgccagcatctgctgggcgggctgttgagcggcctgagctgcgctgaggcggtggtcgcgaccggcgaacacttttgcgcccagttcagcgcttccggcaatagttatttgcaggagcgggtgctggacgtgcgcgatgtctgcttccagcttctgcagcatatctacggtgaggatcgttttccggcaccgggtaagctgacggaagaggctatctgcctcgccgatgaactcacccccagtcagtttcttgaactggataaaaccctgcttaaaggtctgctgctgcgcagcggcggcaccacgtcacatacggtgatcctcgcgcgttcgttcaatattcccaccctggtgggcgtcgatatggaggcgctgctgccgtgggtcgatcggcgagtgcagattgacggtaacgccgggctggtggtggtgaatcccgatgaagcggtggcgcgctactatcagcaggaggcctgggtgcaggcgcagatccgccgccagcagcaggcctggctggataaagcggggcgtacggaagacggtattcgcctggaggtggcggccaacatcgcccattcggtagaggcgacggcggccttcaacaacggcgcgcagtcggtaggcttgttccgcaccgaaatgctctatatggacaggcccagcgcgccgtcggaaaacgagctgtataacctattttgccaggcgctggagccggccaacgggcgcagcattatcatccgcaccatggatatcggcggcgacaagccggtggcctacctcaacattccggcggagaacaacccgttcctcggctaccgggcggtgcgtatttatgaggagtatcaggcactgttccgcactcagctgcgggcgattctgcgcgcttccgcgcacggcgcgctgaaaatcatgatcccgatgatctcctcgatggaggagattctgtgggtgaaagagcagctggcggatgccaaacagtcgctgcgcggcgaacagattccgtttgatgaaaagatcccgctgggcatcatgctcgaggtgccgtcggtgatgtttatcatcgaccagtgctgcgaagagattgatttctttagtatcggcagcaacgacctgacccagtatctgctggcggtggatcgcgataacgccagggtgacgcgccactacaacagcctcaatccggcttttttgcgcgcgctggattacgcggttcaggcggtgcatcgccagggtaaatggatcggcctgtgcggcgagctgggggccaaaggttccgtgctgccgctgctggtggggctggggctggatgagctgagcatgagcgcgccatcgatcccggcgaccaaggcgcgtctggcgcagcttgacagccgcgcctgccgtcagctgctgaatcaggcgatgcagtgccgtacttcgctggaggtcgagcacctgctggcccagttccgtatgacccagcaggacgcgccgctgattacccctcagtgcattacgctgaacagcgactggcgcagtaaagaggaggtgattaagggcatgaccgacaatctgctgctggccgggcgctgccgctatccgcgtaagctggaagcggatctgtgggcccgtgaagcggtgttctccaccgggttagggtttagcttcgccattccgcacagtaaatcggagcatattgagcagtcgaccatcagcgtcgcccgtctggcgcagccggtggcgtggggcgacgacgaggcgcagtttgtgattatgctgacgctcaataagcattcggcgggggatcagcatatgcgtattttctcgcggctggcgcggcgcattatgcatgcggagttccggcaatcgctggtgacggcgcagagcagcgaggcgattgcggcgctgctgcagcgcgagctggagctgtaattcggtccggagaatctccccggtggcgctgcgcttaccggggctacgggtttccagccgtctgcggggcagtagcccggataaggcgtttacgccgcgacccgggatttccgggcccggagcctgagggaggcagattgggtagcccggacaggcgcgtaagcgccgcctccgggaaagcgtgcaggggttccgttcaccgctatcccgcagaaaatgtctcaccgtggtaggtgaacgggtaaagggggagaaaaccgtctccccctttacaatccccgcggtcccgcaaagaaatcggtgctgcgcactgcgctcacctcccggtcctcagcccgcggtcggctcaactcgatattactcgtcccatccctgggactcgcccctacggggccagcgcaagcgctgttcaaaattgctccaggcaattttgtcgtgtctcgattcgcctctggccgccatccctggcggccagcccttgtcttccgacctccggttcgccgatttcagcgggcaccagggcatcgctgcatatcacgttgtttcagaggcatatcgtagctgcacgaacatcgtcccggaggcggcgctgccgcgcccgtctgggcgatctactgcccggcaatcgcccgacaaatcgcttcgcccacctgctgggtggaggcgctgccttgcatatccggcgtcttcggtccgctggcgatggtctgctcaatcgccgccagaatgccgtcgtgggcggcctggtagcgtgcgtccccgttgccgaggaagtcgagcatcatcgcgccggcccagatggtggcaatcgggttggcgatatttttgccgtaaatatccggcgccgaaccgtgtaccgcttcaaacagcgacggaaaggtgcgatccggattgaggtttgccgacggggcaatgccgatggtgccggtacaggccgggccgagatcggagaggatatcgccgaacagattggagccgaccaccacgtcaaaacgttccggctgcagcacgaagcgggcgcacagaatatcaatgtgctgcttatcccatttcacctccgggtagtgctgcgccatcgcttcgacgcgctggtcccagaagggcatgctgatggccagaccgttggatttggtcgccgaggtcagggttttgcgcgggcggctctgcgctaattcaaaggcgtagcgcaggatccggtcaacgccgcgacgggtaaataccgactcctgaatcaccacttcatgttcggtccccggattcacatggccgccgagggcggaatattccccttcggtgttttcacgcaccacgtagaaatcgatatcgccgggctgtttacccgccagcgggcaggggacgccggggaacaggcgcaccggacgcaggttgacgtactggtcgaactcgcggcggaacttcagcagcgagccccacagtgaaatgtggtccggcacgatatccggccagccgaccgcgccgaagtagatcgcatcaaacgtttgcagctgcgcgcgccagtcgtcgggcatcatggcgccgtgctgcgcgtaatagtcgcagctggcccactcaaagtgctcgaagcttaacgccagcccccagcgttcggcggcggcctgcagcacgcggacgccttccggcagcacttctttaccgatgccatcgccggggatggcggcaatacgtaaggttttattcatcgttattctcagtttgaggtaaggaaaattgacttcaccgctatcctataattgactgattcataattaatcccgttaactggtgaaacataaaacacgaatcatgaataatttgccgctgctgaacgatttacgcgtctttatgctggttgcccgccgcgccggttttgccgccgccgcggaagagctcggcgtctcgccggctttcgtcagcaagcgcgtgtcgctgctggagcaaacgctcaacgtccagctgctgcaccgtaccacccggcgcgtggctatcaccgaagagggcgagcgcatctacgaatggggactacgcattttgcaggatgtcgaccagatgatggatgagctctccgatgtgcggcaggtgccgcaggggacgctgcggattatcagcagctttggctttggccggcgggtagtcgcgccggcgctctccgagctggcccgtcgctacccgcagctggagatccgttttgacgtcgccgaccggctggtggatttggccaatgaaggggtcgatctggatattcgcgtcggcgacgatatcgcgcccaatctgatagcccgccagcttgccagcaatcaccgcatcctctgcgcctcgccggcgtttgtcgcccgctatccccggccgaaacagctcagcgatctcgccgcgctgccctgtctggtgatcaaagagcgcgaccggccctttggcgtctggcagctgcgcgatgataaagagggggagcacgccatcaaggtgaccggaccgctgtcgtctaaccacggtgaaatcgtccatcagtggtgcctggaggggcaggggattgcgctgcgctcgtggtgggacgtcagggaaaatatcgccagcggcaatctggtgcagctgctgccggagtactatcagcccgccaatatctgggcggtatacgtgtcgcggctggcgacctcggccaaaattcgtaccaccgtggagtttttgcgccactacttccagcagcgatttccgccgcgcaacggcgagaaaaaatagccgacggccggcgccgtcggccgaggggattacacgccgagccgatcgcgcaggctgtagtaagccgcgcccatggcggtaaacggaatacgcaggctgcgcccgccggggaacggatagtgcggcagcctggcgaaggcgtcgaaacgttcggcgtccccgcgcagcagctccgaaatcagccgtccggcgaggtgggtacaggtgaccccgtggccgctgtagccctgcatataatagatattgttatcgaggcggccaaactgcggcattcgcgagagggtcagcaggaagttgccggtccagcggtagtcgattttcaccccctgcagctgcgggaaggttttcagcagcttcggcataatcagccgctcaacgtcgtccggatcccgcgcgccgtacaccacgccgccgccgtacagcagacggttgtcggcggtcaggcggtagtaatccagcagatagttacaatcttctacgcagtagtttttcgggatcagcgagcgcgccagatcctcagacagcggcgcggtggtgaccacctgggtgccgcacggcatgctgcgtttcgccagctccggctcgagcttatcgccgagataggcgttaccggcgacgatcacgtagcgggcggtgacctgtccgcgtgcggtggtcactaccgccgggctgctgtgctgaatgccggtgaccggtgattgttcgtaaacccggccgccgttgagccgaatggcgtccgcttcgccaatcgccagattgagcggatggatatgaccgccgctgtggtccagcagcgcgccggcgtagcggtcgctgtccacttcgcgacgaatggcgctggcatccagcagctccagctgggtattgccgtagcgctcccagttcgctttctgctcttccagggtctccagctgtttatgattcagcgcgacaaacagcccgccggggcgatagtcgcaggcaatctgatagcgctggatacgttcgcgaataatgtcgccgccttcaaacatcatgctgccgagcattttcgcggcatccgggccgtaggttttttcgataacgtcgatatcgcggctataggagttgactagctggccgccgttgcgtccgctggcgccgaagccgatgcgcgcgccttccagcagcaccacatcgtagcccatttcggccagatgcagcgccgaagagaggccggtatagccgccgccgacgacgcagacgtcgcagccgatcgattcgtccagcgtcgggaacggctcatagcggttggcgctggcggcgtaatagctggtggtatgttcgctcatgattaagactccagggcaatccagatagttttcagttcagtgaatttttccagcgcgtgcagggacttatcgcgtccgttgccgctctgcttatagccgccgaagggcacggtcatatcgccatcgttgtagttgttcacaaagacggagccggctttcagacggcggctgacgcggtgagcgcgggagagatcgcgggtccagaccgccgcgccgaggccgtagcggctgtcgttggccagcgccagcgcctgctcttcggttttaaagcgggtcaccaccagcaccgggccgaagatctcctcctggctgagggcggaggcggggtcgacgtcgacgaagatggtcgggccgaccgccgcgggccacggatttttacgtccatccagcagcagcgtgctgtgcgcttcgccggcgcgaataaagctgtggacgctatcggcgtggctgttgtcgatcagcatgcccatggtggtattcgggtcgagcggattgccaggctgccagccctttgcctgctcttttagcaggtcgagaaagcggtcggcgatgctctcctcaagcagcagacgggtaccggcgatacagacctggccctgattgtagaaaataccgccggcggtggcgttaaccgctttttgcaggtccgggcagtcggcaaagacgatattggcgcttttaccgcccgcctccagccagacgcgcttcatattactgtcgcccgcgtctttcagcagctgtttaccggtgcgggtggagccggtaaaggtgatgacttcaacgtcatgatgctgcgccagcgcctgaccggcctcatggccgaaaccgctcaccacgttgaatacgccgtccggcagcccggcctgtttcgccaggcccgccaggcgcagagcggtaagcggggatttttccgacggcttaagcaccacgctgttgccggacgccagcgccgggccaagcttccagcaggccagcagcagcggaaaattccacggcacaaccgccgcaatcacgccaatcggttcgcggacgatcatggccagctcgttgccgccggtgggggcgacttcgccgtacactttatcgatggcttcggcgtaccagcggatcgcgcgggcggcgccggggacatcgtcgcgcaggctgtggcgaatcggtttaccggtgtcgagggtttccagcagcgccagctcttcgcggtgggcttccatcaggtcggcgaatttatgcagcaccgctttgcgctgggcaggggaggcctgcgaccagtcgccgcgatcgaagacgccgcgggcggcctggaccgcgcgatcgacgtcggcctttttgccgcgcgcgacctcggcgagcgtctgctgggcggtagggtcgacggtggcgaacacgctattatcggcggcggcgctgtattcgccgttaataaatagccgcgtttcaatcgcgatattgtttgctttttcttgccagtaagccaggttgtgaaaatccatcatgactccttaatgacataatcggaaaaataaaaaagtggtgatttcagatcctcagggcgcagggcgtccccggggttgagtaccgtttaaattgcccattaacaggcgtgaattatccggggccagcggaataagtctttccgcattgcgcaaggtgaactgcgttatcttcgcgccgccggagttcgcctccggcggcgcaggcctgaagaaagcctgagaaaacctcaggcgaaaaaatcagaatgtggtgggggtatgggcgctgataattcggcagatacccgccgaggtgttgctgaagctatgcggtatgccggtgttaatggcatagctttgcccagccaccagatgatacgcctgaccgttgatggtcagcacgacttcaccttccagtatggtgcctatctcctcaccctgatgcttgatcctctccccggttgtggttccaggctggtacgtttcaaaaatcatcgccagcgtgcggttcggattgccattatgaaccagcttcatcgacaccccctgactgccgatttcaatcagatcgtcctgattgataaccacctgcggttcagccggtttttctggttcagaaaagaattccgagagcgacagcccgtagactttcagcagcttttgcagcgtactgattgcaggactgactttgtcctgctctatggtgctgatggcactatgtgttaacccagacagttcggcggcacgacgctgtgagagacccagctgttggcggatctctgacagacgtttccctggcgccagtccgtcatcgctcatatttgcatttccttaacggtagtggtcagagtcgctgtttttcagcaatatagctctgacaggcggtgataaaaccttcaaacaacattcgcgacagggcgtattcgctactgttccattcaggatgccactgcacgccgagggcgaaagggtggtcgttaacgctgaccgcttccaccagcccgtccggagaacgcgcctccacgcgcagccgtggacccgtcgtttttgctccctgcccgtgtaacgagtttacccaaaacgtgttgcagcccggtattaactgagaaagtaatcctccttgctgaacctgaacttcatgcgagggcgcatattgctgctcgacgggaagttcggggtcttcgcggtgttcaagaagctcaggctgctcgaacagacgacgatacagagtcccgccggtggcgacaaccagttcctgtagtccacggcagatggcgaaaatggggatgcgcctttcgagcgcggcgtcgatcagcgccatgctcagaagatcacgcccgggatcggcgtcaggctcatcgccgttttcaccatagaggtgcggctgtacgttgctcgggctgccgggcagataaatgccgtccagtttcggcagtagcgcagaaagcagttccggctcggccagcgcgtgcggcagggcaatcggcacgccgccggcgtgaacaatcgcgttcaggtacttctcttgcagagtctgggtctggtgacccttaagcctgtttcgacacatcaccacgccaataactggcttgtacattatattttccatgatcgccctcacaaagtggactaaattatgaccggattagcgggtaaaacggccatttcgttcaatattttctcaatctagcagcggatatagccctttgcaaacttaatttaacatttgacaaacaatttgtttgcatacacattcgaagggtggacattatatttaacagtgccattcagggtccgaaactaaaacaacggcggtgaatcatggaaaccaatatcgtagaagttgagaattttgttcagcagtcggaagagagacgggtcagcgcattcacctgggaagtgaagcgctacctcgagcgttaccccaatacgcaatacgttgatgtgctgctaaccgacctgaacggctgcttccgcggtaagcggatcccggtgtccagcctgagcaagctggagaaggggtgctatttcccggcttcggtgtttgcgatggatattctcggcaacgtggtggaagaggcggggctcggccaggagatgggcgaaccggaccgcacctgcgtgccggtgctgggaaccttaaccccgtcggcggcggacccggaatacattggtcaggttctgctgaccatggttgatgaagatggcgctccctttgacgttgagccgcggaacgtgctgaaccggctctggcagcagctgcgccagcgcgggctgttccccgtggtagcggtagagctggagttctatttacttgaccgcaagcgcgacgcggaaggttacctgcagccgccgtgcgcgccgggaaccggcgatcgcaatacccaaagccaggtttactccgtcgacaacctcaaccactttgccgacgtgcttaacgaaatcgatgagatcgcccagctccagctgatccccgccgacggcgcggtggcggaagcctctcccggccagtttgaaatcaacctccaccataccgataacgtgctcgacgcctgcgatgatgcgctggcgttaaaacgtctcgtgcgtttgatggcggagaagcataagatgcacgccacttttatggcgaaaccctatgaagagcacgccggtagcgggatgcatatccatatcagcatgcagaacaacaaaggcgagaacgtgctggcggacgcggacggcgaagattccgcgatgttaaaacgcgcgctcgccgggatgattgacctgatgccggcgtcgatggcgctgctggcgccgaacgtgaactcgtatcgtcgtttccagccgggaatgtacgtgccgacccaggcgtcgtgggggcacaacaaccggacggtggcgctgcgcattccgtgcggcgatcggcacaatcaccgcgtcgagtatcgcgtggccggggcggacgccaacccgtatctggtgatggcggcgatttttgccggcatcctccacggtctggataatccgctgccgttacaggaagaggtggagggcaacggcctcgagcaggaggggctgccgttcccgattcgccagagcgatgcgctgtgggagtttatgcaaaacgatcatctgcgcgagcggcttggcgaacgcttctgccacgtttatcacgcctgtaaaaatgacgaattactgcagtttgagcgtctgatcacagaaactgaaatcgagtggatgttgaaaaacgcctgattttcgccccgcgaggggcgctttagcattatcacgagtagcatcatgcggcctgagcggagcctggtcggacgtttttgctgggagcccagccattcccggatgtcgcgttaaggagcgcaggcggcaacggggcttcagttaacgacacagtgtgtaacgaggtaggaaatgatgcagatgtttaaatatccgcagggagaagggggccgtcatggccgcatggaatgcgtcgccaccgccgctcgtcggttctttttaccttttgatttgccattaaccccgttgcgaagcaggttggtttcccggtctctacgaccgcaaacccaggtgtgcagcgggggaaatggctatgtctattaatccctctctcgataacgcctccggggcggaaaaaccgcgcctgcgcaagtctctcaagctgtggcaggtggtgatgatgggcctcgcctatctgacgccgatgacggttttcgatactttcggcatcgtctccggcatcagcaacggccacgtcccggcgtcctatctgctggcgctggccggggtgctgtttaccgccatcagctacggcaagctggtgcgccagtttccgcaggcgggttcggcctatacctatgcgcagaagtcgatcagcccgcacgtcggttttatggtgggctggtcatcgctgctggattatctattcctgccgatgatcaacgtgctgctggcgaagatttatctttccgcgctgtttccggacgtgccgccctgggtgtgggtggtgacgtttgtggctattctcaccgcggcgaacctgaaaagcgtcaacctggtggcgaacttcaacaccctgttcgtgctggtgcagatctcgattatggtggtctttatcgtgctggtggtgcaggggttgcataaaggggaaggggtgggcaccgtctggtcgctccagccgtttattagccagaatgcgcacctgatcccgatcattaccggggcgacgatagtctgcttttcgttcctcggtttcgatgcggtgaccactctttccgaagagacgccggacgccgcgcgggtgatcccgaaggccatcttccttactgcggtctacggtggggtgatttttatcgccgcctcgttttttatgcagctctttttccccgatattagccgttttaaagacccggacgcggcgctaccggagatcgccctctacgttggcggcaagctgttccagtcgattttcctgtgcacgacgtttgtgaataccctggcctcaggcctggcttcgcacgccagcgtgtcacggctgctgtacgtcatgggccgcgataacgttttcccggagcgcattttcggctacgtccatccgaaatggcgtaccccggcgctgaacgtgatcatggtggggattgtcgcgctgtcggcgctgttctttgacctggtcaccgccacggcgctgattaactttggcgcgctggtggcgtttaccttcgttaacctgtcggtatttaaccacttctggcggcgtaaaggttttaacaaaacctggaaagatcgctttcactatctgcttttgccgatggtgggcgcgctaacggtgggcgtactgtggattaacctggaggcgacctcgctgacgctgggtctgatatgggcgggcctcgggctgctgtatctgacgtatctgacccgccgcttccgcaagccgccgccgcagtttgacggcgccaaagcggaacaggcctgggaatcgtaacgattttttacgccgacacaaaggcaggcgattgagcctgccttcttttttgtcattctcgtttgaaatcaggcgctcgggaggagatagcaggggcagaaggtaagaatagtgaggacgtattatttctttttcttatgagttggcagctgtgcagagcgccgatccttcacataggagaccaggctgaagatggctactcccagcaaaaccaccgcgacgataaagagcaggatacctgacatagattaacctaatgttatgtttaacatgaagaaaaaataccgtgatatcgagataatagcatcgggatatttcttaaagatgacccgatgaatcagacgaaaatagactgccagcaatacactgaaattattatttacatgaataaatgtgaagagtaaagcaaaggcgtggtgaaaaaatgaacgggttacactcgtttaagcgaatttacagacgagagtcccacaggctgctacccttggcccgcttaaatagggttgagagtaataaatgtttaacaagcatatcatcggtcttattgggccgttgttgattctgacttcattgcatagcctggctgacgccgggcatccgtcaattcgtgaacgtattgtcgagcaggtgttaaaaccctgcgaaggaaaaaaagccggcgataaagtgcagatcgtcgaccatcgcggcggcaagcatgcggctatctgcacgctggcggcggtaccgctaccggagtaacgccctccctctgatttcagcctcccttcgttctggcggaaagcgtatttctttccgcactttgcgagccattgcccggaaaaatgtcataaatttgtcacaattaaggcgatgataatcactgactgaggattaagggatgagaaaaagtctactcgctgccgccgtgaccggcgttattttactctccgccggcgtccaggcgcaggaacaggcggcaccggaagggtaccagcttcagcaggtgctgatcatgagccgccataacctgcgcgcgccgctggcgaacaacggcagcgtgctggagcaatcaacgccgaagtcctggcctgagtgggatgtccccggcggccagctgaccaccaagggcggggtgctggaagtgtatatggggcactatatgcgcgaatggctggcgcagcaggggctggtgaccagcggcgaatgcccgccggagaacgcggtctacgcctatgccaatagcctgcagcgcaccgtcgccaccgcgcagttctttatcaccggcgcgtttcccggctgcggcgtgaccgtgcaccatcaggaaaaaatgggcaccatggacccgacgtttaatccggtgatcgtcgacgattccgccgcgtttagcgaaaaggcggtgcaggcgatggagaaagagcggcaggggatgcagctgagcgaaagctataagctgctggaggagatgaccgactaccgtaactccccgtcctgcaaagagaagcagcagtgctcgctgagcgacgcgaaagacacctttagcgccaaatatcagcaggagccgggcgtttccgggccgcttaaagtcggcaactcgctggttgacgcctttacgctgcaatattacgaaggtttcccgaaagaccaggtggcgtggggcgaaatcgccagcgataagcagtggcaggtgctgtcgaagctgaaaaacggctatcaggacagtctcttcacctcgccggaagtggcgcgcaacgtggctaaaccgctggtgaaatatatcgataacgcgctggtgggcgacgcggcgaaagcggcgaaagtcacgctgctggtggggcacgattccaatatcgcctcgctgctgacggcgctggattttaaaccttatcagctgcacaaccagtacgaacgtacgcccatcggcggcaagctggtgttccagcgctggcatgataagagcggccatcgcgacttgatgaagattgagtacgtgtatcaaagtaccgaacagctgcgcaatgccgatgcgctgaccctgcaatcgccgccgcagcgggtgacgctggcgctaaacggttgtccggtcgatgacaacggcttctgtccgatggacacctttaaaaaagcgatggccgaggccacgaagtagcagagtataaaaaacccggagcaatccgggtcttgctgccgatgtttagcctggtcttgtagcccgaacaggcgcaacgccccgcctccgggaagctcatgcaagaactcccggaggcggtactgcgtacctgtcccggctacacgttcttgcgttcgatagtttgttcgccccagaacagggagtctttgtcggttttggcgaaggcgaggggcaggacttcatcgctgccttcttcccagattttctccgccagcttttcatcgtaattggctaattcaaaaatcgcctcggcaatttcgggagacgtattgcgcagactggcccattcacccacgcggtgggcctttgtttcttgattcggcatgcttgtcctcctgctgaagattaaccgtgtaatttcactgccagacccgcaacgtgttgcccctgatagcgggcaatggctaattcttcttcacttggctggcgtgagccgtcgccgccggcaatggtggtggcgccgtaaggcgtgccgccgcgaacctgcgagacatcaaacagctcctgggcgccgtagccaatcggtacaataatcatcccgtggtgggcaagcgtggtccaggttgaggtgatggtttgctcctgaccgccgccggtaccggttgagctgaatacgctggccagtttgccgtacagcgctccggacgcccacaggccgccggtctgatcgagaaaggtgcgcatctgtccggacatattgccgaaacgggttggggtaccaaagatgatggcgtcgtactcagccagctcctgcggcgtggcgacgggcgcgttttgcgttttcccgcctgctttggcaaaaacctctgcctgcatggtttccggcacgcgcttcacgaccacttcaacgccatctaccttgtttgctccttcggcgacggcatgcgccatggtctcaatgtgtccgtacatggaataataaagcaccagaatcttagccatttgcatcactcctcggttgcgttatgagccagccagtcgactggctacctttaaagataagacctctggcgaagagtgcaaatgcaacaatcatttatttgatttataacaacattgctaacattcagggctgttgcaaaaagatacatcttcagcggcgctattttaggctgtcataagagtcgcttagcgcgcgtccggcgcaatagcggcagtttttatacaaaatctatttcagaatgtgacgatatccacccggcacggctttccttcgctaaccttaaaagcacgtgatacgcaacccgtatcgcggaggccagagcctcgtgtttcacctaatgcagcatgatgtctaacctaaatggaggtcagtaatggcaaaccatcgtggcggtgctggcaactttgccgaagaccgtgaaagagcatcagaagcaggtcgtaaaggtggccagcatagcggggggaactttaaaaacgatcctcaacgcgcttccgaagcgggcaagaaagggggcaaaaacagtcatggtagccgcgaaagctagcgcgccggattgttgctgatgggggttaatctcccgggcccgaccccatcaccctcgccgccgacgtcacgtcggcggttttttttccgctttgcaggttccgctaagcgggaggaacgcccggctcgcggcgtaaacgccttagccgggctacggggtgacgctgttttgtagccccggtaagcgcagcgcgaccggggatttcccggtacgggtctgctggcgttgcacgctttcataccggggtgacgttggtttgcccggcctcacgcggacggcggttaagcagagcgtggagcaggatcgcgccgaaggtggccgtcccgatgccgccgagggtaaagccgccgagcgaaagcgcgaagtcgcccgcccccagcaccagcgtcaccgctaccataatcagatttgcgttctggctcaaatccacgcggttctgcacccaaattcgcgcgcccgcgacggcaatcaggccgaacaccacaatcgatgcgccgccgatcaccggtcccggaatggtatggatcagcgcgccaaatttcggtgaaaacccaagcagcatcgcaatcagcgccgccgcgacgaacaccagcgtcgagtatactttggtgaccgccatcacgccgatattctccgcgtaggtggtcacgccgctgccgccaaccgagccggagagcatcgttgccagtccgtcgccgacgaacgcgcggcccatatacgggtccatattgcgcccggtcatcccggcaaccgccttcaggtggccgaggttttccgccaccagaatcaccgccacgggagcgatcagcatcattgcctggccgttaaaggtcggggcggtcatctgcggcaaaccgaaccacgccgcctgctcaagcaggctaaaatccagcggcttgcccagcccgaggccgttggccagcaatgcgtacagcgcgcaggcgataatcagcccgacgaggatcagcagccgctgcagcatcccgcgggtaaacaccgcgaccaggccgatgcacagcaccgtcagcaccgccatccagccgtcgaacggcgttgctgatacgctgcgtaccgcgatgggcgcgaggttaaggcctatcgccatgaccaccgcgccggtgactaccggcggcatcagccgctcaatccagcgggtaccgattttcatcaccaccaggccaatcagggtataaaccagcccgcagaggataatgccgcccagcgcgacgctaagatgcgggttaagcccctggccgttgaagccggtaacggcgatgaccacgccgacaaaggcagcgctggagccaaggtagctcggcacgcgcccgccggtaaccaaaaagaacagcagggtgccgatgccggacatcaggatcgacagattgggatccagccccatcaggattggcatcaggacggtcgcgccaaacatcgccaccgcgtgctgaacgcccatcaccacggtttgcccgaccgacagacgttcatcgggggccacgacgccggacgcggcggagggggaggttaactgccagcgaggaaaatcgaagagagccatgatgagatcctgggtttagggttaacaggctggacgcatcagcgtgtggtagccgcggtcgaaccacatcagtccgcgcggttccggatggcgtacaatcgccgccacttcgcaaaacaggatgtcgtgagttccgacgctgacgatctggctgatgcggcagtcgaagctgaccagcgccgcttccagacgcggacagccggtcgcgccggtttgccagtcggcggcggcgaagcgctccgccatcggcgttttaccgccgaaaaggttcgagagtccttcctgaccggccgccagggtattaacgcacagcgcctggtgctggctgaagatcggccataccgaggcggaacgattcaggcacaccagcagcgtgggcggcgcgtcggtaacgctgcagacggcgctggcggtaaagccggcgcggcctgcgggaccatcggtggtgatgatgttgaccgccgccccgacgtgggccatggcgtcgcgaaagctttgtttatcggcagtagacatacgggctccttatgccagctggcaggcatcatcaaaaggcagacgcggcaggcgagcgtacagcttgccgggatcgccgtagccgatattaatcagcaggttgcttttccaggcgccgtcggcaaaaaacgccgcatcgactttttcgcggtcaaagcccgacatggggccggtgtccagacccagcgcgcggcaggcgaaaatcaggtacgccgcctgcaatgaaccgttgcgaaaggcggtctcttccaccatctgcgggctggaggtaaaccagctgcgggcgtcgccgtgagggaacagctccggcagccggtcatagaacgcgctgtcccaggcgacgatagcggtgaccggcgcctgcagggtcttcgcaacgttgccgctcgacagggccgggcgcagcttctctttgccttccggtgtgcggatgaaaacgaagcgcgccggggagcagttagcggaggtcggtcccattttcagcaaggcgtagatttcacgcagctgctcgtcgctgaccggcctgtccagccagccgttgtgggttcgggcctcggtaaacagcgcggcgcaggcggccgggctaatggcttcgctcatagattctcctgggggacgggcagcatcgcggccagcccgtcgcataaaatagggttaaaggtggcggtatcggtgacgttgcaggcgtggccgccccaggccatttccgccagctggctgccggggattgccgcctgcagcacgcgggagcaggaggccgggaccagcagatcgtcagcggcgctgataatcagcgtcgggcaggttatcgctgccgcccgccgcgaaaagtcggcctgcttgagggcgttcagccttttcagtaaattctctttgccctggaaatggctgatggcgagcgcgtcttcggcctccagccgcggcaggcgagaggccatccactccgccggatagaggaacagcggctgcgcttctacccacgcctgcgcgccgcccgcgtgcagcaggcgttcgcgcaccagaaagcagcggcgggtatgcggggagagcgtcagccagccgttcaccagcaccagggcgcttatcgcttcgggatggtccagcgccagctgcagaccgatcagcgcgcccagggcgtgaccgaccagcgcaaaacgcacaatccccgcctcctgcagcgccgcgttaagctcctgcgccatggccgccatgctgtagccgacgggcagcgggccgccgttttcaccggtgcctttatggtcatagctcaccagctgatagtgcggttcgagcgccgcccgctgcggtagccagtagccgcccgcgccgccgagcccggcgctcagaaccaccaccggcgcgcccggataaggtgccggggagacatttagcttcatcatgccggcttcccgatatgcgcgacggtggctatttccaccagcgcatcgggcttcaccagcccgcactgaatgcagaaacgcgccggtttgtcgccggggaagaactccgcgtagacctcattaatcgcggcgtagtttttccagtcggtgataaagatgctgttgaaggtcacatccgtcatactgccccccgccgtctcgataacgctcttgatggtttccagcacgtggcgggtttgcgcctttgggtcgccgatataaaccacgttgttttgcttatcaaacggcagggtgccggagacgtaaaccacgccgtcggccagcgtgcccgggacaaacggggcgataggcgtggtggtgcctggcggaataatcacctgtttaggcataacgtttctcctcggaaaaggcgcgcggcgcggcgggctcaagggcggtacagaagctggcgacatcgctgacccagccaaagaaggtttcgatattgaacagcgccgcctgctgggcgaacgccggaccggcctgatgggtagcgtcttccagcacgataccgaaatactcgaggaagaagccgtcgcgcagggtcgattccacgcagacgttggtggcaataccggtaaagatcagatggcggatgccgcggctgcgtagaatgctgtcgagcgcggtgttaaagaagccgctgtagcgcggtttcggcagcacgatatcgccgggctgcggcttaagctgatcgaccagctgatagtcccagccgcctttcgccagcagcttgccctgcagctccgggttctttcgcatggttttcagcgcgttggatttatgaaaattcggcgaaccggggccgccggcctccacgtactggtcgtcccagccgttctggaaccagataatcagcatcccggcggcgcgcgcggcggccacggcgacgttgatattgtcgataaccgggcgggtggcggaaacgtcaaatccggcgaggtcgagatagccgccctggctggcgtaggcgttctgcatatcgacaacgatcagcgcgctctgctgcggcgcaaaggtcagggattccgggcgagcgggcagggtaatcatcaggcaacctcttgagtcatggtggcgatatggtcgcggcagcgcatcagcggctgaatgcgctgaccaaaggcttcgataccgataaggaaatcatcaaacgtcagcagcacgccgtcggtgccggggaccgccgccacttcgtcgagcatgcgggcgacgctggcgtaagagccgacaagggtgcccatattgatgttgaccgccgaggtgggatcggccatctggcgcacgttggtgtcgctgccggagcgggtgtctttctggctctgttcggtgagccacgccagcgcttcgtcatcggcgccggctttgtaatgctcccatttggcgcgggccgcctcgtcggtttcgtcggcaatcaccatgaacaggacgtaggaaccgacgtcgcggccggttttttccgccgcctccatcatccgcgcggcggtgggggcgaaggcggcaggggtgttgacccctttgccgaagcagaagttgtagtcagcgtgccgggcggagaacgccataccggcgtcgctttgcccggcgcagatcactttcatcggctgcgacggctgcgggctgacgcggcagtcgttcatggtgaagtagtcgcctttaaagtcgctgcgcccggttccccacaggtcgcgcaggacctggacatattcggtgagatagtcgtagcggctggcgaagtagtcgtcgcccggccagatgcccatctgctcgtattccggcttttgccagccggtgaccagattgacgccaaagcggccgccggagatagagtcgatagtcgaggccatgcgcgcgacgatcgccgggggtagcgtcagcgtggcggcggtggcgtagatctgaatgcgcgaagtgacggccgccagtccggccatcagggtgaaggactccagattatgatcccagaattcggtcttgccgccgaagccgcgcagtttaatcatcgacagcgcgaaatcgaagccgtagtgttcggctttttgcacgatggccttattgagctcaaacgtcggcatgtactggggagcatgggtggaaatcagccagccgttattaccaatcggaacgaagacaccaattttcatacctacctctctgcatgtcgttgaacaagaaggcgcggcgctgcatcctgcatctccctcaatcacctcgcctgaaagataaagcaaaggcgatgccagttttgcaaaggctaatgttattaaggtgttgctggatggttgctgaaaatagcagcaataaaagtggactgaatggtcaaaatcggtgcacgaaaaaaccgcagtcgtgcgcaatcagggtgcagagagtcgtgtcggcgctgggcttttgctatgctgatggcgtgaaaagaaggagataacgaatggcacagggcggcgtgaaaaagatcggcaaacgctcacaggcggtgagcgcgaaaaaagaggctatcctggccgccgcgctggacgcgttctcgcagtttggtatccacggtacccggcttgagcaggtcgccgaactggccggggtatcgaaaacgaacctgctctactactacccgtcgaaagaggcgctgtatattgccgtgctgcagcagattctggctatctggctggcgccgctaaaggcctttcgcgaagatatcagcccgctggtggccatcggcgaatatatccgccttaagctggaggtttcccgcgatcacccgcaggcgtcaaggttgttctgcctggagatgctgcagggcgcgccgctgctgatgggcgagctgaccggcgatctgaaagcgctggtggatgaaaagtcggcgattatttccggctgggtcgagagcggcaggctggcgccggttgacccgcagcatctgatctttatgatctgggcgaccacacagcactacgccgatttcgccactcaggttgaggcggtaaccggcgcgacgctgcgcgatgaggcgttttttcagcaaaccgtcgataacgtccagcggatgattatcgaagggattcgcgtacgttaattggcgggcggcagcgggcagctctgatcgccatcctcgcactgcagcagcgaggcgaggaacgattcgcgctcgacggttttatcggacatgcactggttgatcagcatcggctgtacgctgccgccttcagcgccggaggcgaggaattgacagtcggcgtcgcgcagggcaatccacgacagctgcgcttttttcagcaactcctgctgcttgccggaggcgcgcttcagcgcttcctggtacgtttcatttagttttttgtcgtcagcctggtaccgctcggcggtgcactggttcatttccgtttgattgctggcgttgctgcattcgtccgccagcgcatgggtgcttgccagcagcgcggcaaaagcgagtaaagtgcgtttcattggtcaactcccataaaaaaagctcccgtccgggagccttaattaaccacagcctgcgtctggtgtcattagctgacgttgtgccgtctgctttcccgggggcggcgcaaagcgccttgcccgggctactgatagtgcgggctgtggttgggtagcccgggtaaggcatcagccgcaacccgggaagcaggcttagccaatcgtcatcaggctggcgttgccgccggccgcggcggtattgacgctgagcgaacgttcaatatagaggcgctccagcagcagattgctctcgccgcgggcgaagccctgcaccgacacgatcgcgccatcgcgcgccgccacctgttcgcacagttcccgcagctgatcggaatcgccgtggtagataaccgcatcgaaaggctcggtcgtcagggtttccgctttggcgaagtggatccgcgcgctgacctcacgcggcagctttttcgccagctcgcgctgcagaggggcgtccggccacagcacttcgcagccaacggcggtcacgcccgccagctgggtgagcgcatcctgctcattatcggccacgcacagcacgcggtcgcgcggcataaaggtcagggtgttgcgctcgccggttggccccggcagcagacgctgggttccggcctgcgcctgctcgctgaactgctggcacaaagcctgcagctccgggcgatccgccgcccactgctgtaaagcgaccagcggtttttccagcagcgtcttcagctgcgcgtccagcggatactccgcgtcctggcgggcgagggtaatcccgacggcgttctgcgggcggctggagagcagccgatacagatacagcgggccgccggcttttggacccgtacccgacaggccctcgccgccgaacggctgcacgccgaccacggcgccgaccatattacggttgacgtacaggttgccgacattggcgctgccggtgacctgagcgatggtttcgtcaatacgggtatgcacgccgagggtcagaccgtagccggaggcgttaatctgtttgaccagcccgtccagttcgttgcggttatagcgcactacgtgcagcaccgggccgaagacctcttttttcagttcatcgaagctgtcgagctcaatcagcgtcggcggaacgaaagtaccgcaggtccactcgcgggaatcttcgctgttttcgcgcaccgcctggaagactttgcgcccttttgcgcgcagcgtctggatgtggcgctcgatattctctttggcttcggcgtcaatcaccggcccgatatcggtggtcagacggcccggattgcccatccggcactcggccatcgcgccgcgcagcatggtcagcgtatgatcggcgatatcatcctgcaggcagagtacgcgcagggcggagcagcgctgccccgcgctgtcgaacgccgaggcgagcacgtcgacaaccacctgctcggttaatgctgaagagtcgacgatcatcgcgttcatgccgccggtttcggcgatcagcggcgtcggacgaccctgagcatccagccggctggcgatattgcgctgcagcagggtggcgacttcggttgagccggtaaacatcacgccgcgtacgcgctcgtcggaagtcagcgcggcgccgacggtttctccgcggcccggcagcagctgaataacgcccggcggtacgcccgcttccagcaggatcgccacgccctgagcggcgatgagcggcgtctgctcggccggttttgccagcacggtattgcctgccgccagcgcggcggcaatttgtccgctaaagatcgccagcgggaagttccacgggctgatacagacgaccgggcccagcgggcgatgggtttcattgtcaaaatcgttgcgcacctgaccggcgtagtagtggaggaagtccaccgcttcgcgcacttcggcaatcgcgttgctgaaggttttccccgcttcgcgcaccaggatgcccatcagggtcggcatctggccttccatcagcaccgcggcgcgttcgaggatcgccgcgcgctcctgcggcggggtggcgaaccagattggcgcgttgttaaccgcgctggtcagcgcctgctgaacttcgtcctcgctggcttcgcgcacgtagccgacgatatcttttggctccgccgggttcacgaccgcctgcatttcgccttcggccaccgggtgctccagcatcggcagcgcctgccatttatgcagcgcgctgtttaataacgaggaggagagggaggccagacgatgctcgttggcgagatccagaccggctgaattgctgcggtctttgccgtaaaggtcgcgcggcagcgggattttcgggtgcggaagacccacctggccctcctgctgggccagtttttccaccgcggcgaccgggtcggcaaccagctcatccagcggcagggtgctgtcagcgatacggttcacgaacgaggtgttggcgccgttttccagcagacgacgcacaaggtaggccagcagcgtttcgtgggtgccgaccggcgcgtagatacggcacgggcggttgagtttgccatcggcgactttaccggtcacctgctcgtacagcggctcgcccatgccgtgcaggcactggaattcgtactgtcccgggtagtagttctgtccggccagctgataaattgccgccagggtgtgggcgttatgggtcgcgaactgcggatagatcaggctcggcaccgccagcagctttttcgcacaggccagataggagacgtcggtgtagaccttgcgggtatagaccggatagccttcgagaccgtccatctgcgcgcgtttgatttcgctgtcccagtaggcgcctttgaccagacgaatcatcaggcggcgacggctgcgggtcgcgaggtcgattaggtagtcaatcatgaacgggcagcgtttctgataggcctggatcacaaagccaatcccgttccagcccgccagctccggttcaaagcagagtttttccagcagatcgagagagatctccaggcgatcggcctcttcggcgtcaatgttgataccgatatcgtactggcgcgccagcagggtcagcgatttcaggcgcgggtaaagctcttccatcgcgcggtcgtactgggcgcggctgtagcgcgggtgcagcgcggagagcttaatcgaaatgcccggcccttcataaatgccccgtccgttggaggctttgccgatggcgtggatcgcctgctggtaggagaccatataggcctgggcatcgtcggcggtcagcgccgcttcgcccagcatatcgtaggagtagcggaagcctttgtcttccagcttgcgggcgttggccagcgcttcgacgatggtttcgccggtgacgaactgctcgcccatcaggcgcatcgccatatcgacgcctttacgaatcagcggttcgccgcttttgccgataatacggttcagcgagcgcgacaggctggtttcgttgtgggtggagaccagcttgccggtaaacagcagcccccaggtggcggcgttgacgaacagcgacgggctgcggccgatatgcgactgccagttgccgttgctgattttgtcgcggatcagggcatcgcgggtggctttgtcgggaatgcgcagcagcgcttccgccaggcacatcagggccacgccttcctgcgaggagagcgagaactcctgcagcaggctctgcaccattccggcgcggccgctggcggttttctgattgcgcagcttctccgccagctgataggcgagcttgtgcgcctgttcgccgagagtctgcggcaggcgagcctgctccagcagcatcggcacggcgtcggtttcggcccagcgccaggcggcggtgatcgacgcgcgggaaacggactgcggcaggatctgctcggcgaaatcgaggaagggctgataaggttcgtcagccggatgaccggcctcatcgctttcgttcgccgcgccggacagcagcgccggcagctccggcagcgtctcgtcgttttccagcttttccagatagttgaaaatggcctgtttaatcagccagtgcggcgtgcggtcaatacggctcgccgcggatttaatgcgttcacgcgtcgcgtcgtcaagttttacacccatggtggtggtgcccatgtcaggaactcctgtaatagaacgtcttcgtgccaagatgaggttgcgtagaaatatctaccatgttgcaactttgtgcaaccttgttaattgagaattgtgtggcaggtagaaaaacgccgtgaatgttaaaaatgatgatgaaaatagcaggtatttatcccctgtctaataaggtatttctatgcgtcacttaacacttttgcgtggtgcaaccgctaaaaacgtgagagagtgcaacctataacaaaatgaagtttggtcccggaagcatttcgtgtaaatgctgtgttaaatcgtttgtgaaaaaacaaagcttccgtcaggatacggtcgcccaatacaaccaataggccattgccccgttccggtagtggataaaacgacaaatttggatgctgtcgacaaaaattctggagatttttacatggctattagcacacccatgttggtgacttttattgtttatatttttggcatggtactcatcggctttattgcctggcgctcgacaaagaactttgatgattatattctcggcggccgcagccttggcccatttgtcaccgcgctctccgccggagcctccgatatgagcggctggctgctgatggggctgccgggggcgatatttatttccggtatttccgaaagctggattgccattggcctgacgttaggcgcatggattaactggaagctggtggcggggcgtttgcgggtccataccgaggcgaataataacgccctgacgctgccggattatttcaccggccgttttgaagacaaaagccgcgtgctgcgaattatctcggcgctggtcattttgttatttttcaccatctattgcgcttccggtattgtggccggcgcgcgtctgtttgaaagcacctttggcatgagctacgaaaccgcgctgtgggccggggcggcggcaaccattatttatacctttgtcggcggcttcctcgcggtaagctggaccgataccgttcaggccagcctgatgatattcgccctgatcctgacgccggtgatggtggtgatttccgtcggcgggtttggcgattccctggaagtgattaagcaaaagagcattgagaacgttgatatgctcaagggcctgaacttcgtggcgattatttcgctgatgggctggggcctgggctattttggtcagccgcatattctggcgcgctttatggcggcggattcgcatcacagcatcgttcacgcccgtcgcatcagcatgacctggatgatcctctgcctggcgggtgcctgttccgtcggcttcttcggtattgcctacttcaataacaacccggccgttgccggtgcggttaatcagaacgccgaacgcgtctttatcgaactggcgcagattctgttcaacccgtggattgccgggatcctgctgtcggcgattctggcggcggtgatgtccaccctgagctgccagctgctggtgtgctcaagcgccattactgaagatctgtataaagcgtttttgcgtaaaaatgccgggcagaaagagctggtatgggtaggacgctttatggtgctgctcgtcgcgttaattgcgatcgccctggcggccaacccggaaaaccgcgtgctgggtctggtgagctacgcatgggctggctttggcgcggcgtttggcccggtggtgctgttctcggtgatgtggtcacgaatgacccgtaacggtgcgctggccgggatgatcatcggcgccttaacggtcattatctggaagcagttcggctggctgggcctgtatgaaatcatcccaggctttatctttggtagcctggggattgtggtcttcagcctgctgggtaaagcgccctccgccgagatgcagcgacgcttcgccgaagcggacgcccattatcactccgcgccgccggtgcgcgcgaccgccgagtaatcctctgcaaccccatcaagcccgcgtaatgcgggctttgttatttatgcctcttgctaatggcttgaaaatacgctgatatctcagcacaaataacaatgagggtagcaaaatgagtttcaaacagggtgcagtggcgctggtactggcagggatattaagcggctgcgtagcgcccgccgcgaagacggctccggcggcggacgctaacgcctgcccggcggataacgccatggtgcaaaccacgctttatttcggcttaagccgtccggccgggaaggatattaccgcgcaggagtggcagcagttcgttgaccgcgacgtgacgccgcgctttcgcgatggcctgacggtctttgacgcgcgcgggcagtggctgggcaatgacggtaccgtggcgcgcgagcagagcaaagcgctgatgctgattcatggcaaagatgcgaagagcgaagaggggattgaggcgctgcgcacgacctataaatcacgctttgcgcaggagtcggtgatgcgcgttgaccagccggtctgcgtacatttttaatttgaatcaggtgatattcccgggttgcggctaacgccttacccgggctacatagctacgcgggcctgttaccccggggtaacaggccaaacgcgcttcggttacagtaccagccccgcaaagctggcggagagcaggctgaccagcgttgcgccatacaccaggcgcaggccgaagcgggaaacgatattcccctgctgctcgttcaggcctttaatcgccccggcgataatgccgatagaggcaaagttggcgaaggaaaccaggaacacggataaaattcccagcccgcgcggcgtcatgctggcggctattttttgcagctcaatcatagcgacaaattcattggccaccagtttcgtcgccataatactcccggcgttcagcgcatcgctaagcggaatgccaatcagccacgccaggggataaaagacgtagccgaggatctgctggaagctcaggccaaatatcgtggcgaacagggcatttatggcgctaattaaggcgataaaaccaatcagcatcgccagaataatcatcgcgactttaaaaccggccagaatatattcaccgagcatttcaaagaagctctgggattcatgcagtttttcaagcttgatctcctcctcgctgcccggacgcgtcgggttaatgatcgacagcacaataaaggtgctgaacatattcaggatcagcgcggcgacgacgtatttcgcgtcgagcatactcatataagcgccgacgatggagagcgacaccgtcgacatcgcggtggccgacatggtgaacaggcggcgggaagagagatcgccgagcacgcctttataggcaataaagttctctgattgaccgagaatcagcgaactgaccgcgttgaaggactccagcttacccataccgttaacctttgacagcagggtgccaatcaggcgaataaaaattggcagaatacgccagtgctgaagaataccgatgagcgcggagataaagacaatggggcacagcacgccaaggaaaataaacgccagccctttttcactcatgccgccaaatacaaagttggtgccttcggcggcaaagccgagcagtgattcaaaaaaggatgcgatatttttcactagccacaggccgctttcggcgtggagaaaaaagaaagccagggcaacttcaataataattaactggataatatagcgaatgcggatttttttacggtcgtagctggcaagccaggcaagggcgaggataaccaccagcgccagcaggaagtgcaagaattgagtcatgtcgtttatttcgcaggtcaataaggccgccatttagccacagccgggcagccgggtaaatatctggcgcaaaaaatcccgtcctcctgcccgaggggcctgggttgcgagataatcgcgcaagtcattatttgttcgcgactgatttacaaatcgtcatcattcactccacatttcacttgtgtttctgattattgtaatgataatcactatcataaatatttacctatctttgcatcagttgactgcggttcacatttaagggtgttggcatgtttgtcccatttctcatcatgttacgtgaaggcctggaagctgcgctgattgtcagcctgattgccagctatctgaaacgcacccagcgcggtagctggattggcgtcatgtggattggggtgctgcttgcggcggcgctgtgcctgggcctcggaatttttatcaacgaaaccaccggcgagtttccgcagcgcgagcaggagctgttcgaaggcatcgtggcggtggtggcggtgtgcattctgacctggatggtgttctggatgcgtaaggtgtcgcgcaacgtcaaacagcagcttgagcaggcggttgataatgccctccagcgtggaaataaccacggctgggcgctggtgatgatggtttttttcgccgtcgcgcgtgaaggcctggaatcggtcttcttcctgctcgccgctttccagcaggatgtcggaatctggccgcccatcggcgcgatgctcggcctggcgacggccatcgttttagggttcctgatctactggggcggcatccgcatgaatctcgccgtctttttcaaatggaccagcctgtttattttactggtggccgcaggcctcgccgcgggggctatccgcgccttccatgaggccggactgtggaaccatttccaggcggtcgccttcgacctgagcaacgtcatttcgacgcacaccctattcggcacgctgctggaagggatcttcggctatcaggaaacgccgaccgtcagcgaagtggcggtctactttatctatttgatcccggcgctggtgctgtacgtctcgccgccgggtaaaaaaaccaccgcatcccgggcagcgtagtcgggcatcgcggattgcaatagtgacaacatacttatcgaaagggatggtcatgatgaatcattttcgtcgtaatgcgctgcagcttacgcttgctgcgctgttcagctcggctttttacgcccaggcggccgatattccgcaggtcaaagtgaccgtcaccgacaaacagtgcgagccgatgaacgtcaccgtgaaggcgggtaaaacccagttcatcattcagaaccacagccagaaagcgctggagtgggagattctgaaaggggtgatggtggtggaagagcgggagaatatcgcccccggctttacgcaaaagctgacggccaacctgcagccgggtgaatatgatatgacctgcggcctgctgactaacccgaaaggcaaactgacggtgaccggcgaggcgaccaaagatgccgccaaagccgatgcgctgctcagcctgggtgaagctattaccgcctataaagcctgggtcaccgccgagaccgcggagctggttagcggcacgaaagcctttaccgatgcggtgaaagcgggcgatatcgagaaggcgaaagcgctgtacgcgccgacgcgccagcactatgaacgtattgaaccgatcgccgaactgttctccgatctcgatggcagcattgacgcccgcgaggatgactacgagaaaaaagccgaagatccgaaattcaccggcttccaccggctggaaaaagcgctgtttggcgataacagcgtcaagggaatggataactatgccgatcaattgaacgctgacgttctcgagctgcaaaaacgcattagcgaactggcgttcccgccgtcaaaagtggtcggcggcgcggccggtctgattgaagaagtggccgccagcaaaatcagcggcgaagaagatcgctacagccataccgacctgtgggatttccaggccaacattgacggcgcgcagaaaatcgtcgacctgctgcgtccgcagctgcaaaaagagaacagcgcgctgctggcgaaggtggatgccaacttcaaaaaggtggacgccattctcagcaaataccgcaccaaagatggctttgagacctatgacaagctgacggatgccgatcgtaacgcgctgaaaggcccgatcaccacgctggcggaagatttggcccagctgcgcgggatcctgggtctggactaaggcgatggctgagcaaaaatatgatgttaatcaaccgtcccggcggcggttgttaaaagggatcggcgcgcttggcggcgcgctggcgatatccggcggctgtccggtggcgcacgcggcaaaagacaatagctctccgggcacggtgtcgccggatgcgcgtcaggaagcgcagccgttttatggtccacatcaggcaggggtgctgaccccgcagcaggcgtcgatgatgattgtcgcctttgatgtgctggccagcgataaagcggaccttgagcggctgtttcgcctgctgacccggcgtatcgcctttctgaccaaaggcggtcccgcgccggagacgccgaacccgcggctgccgccgatggactcaggcattctcgggccgtggatcgccccggataatttgacgatcaccgtctcggtggggcattcgctgtttgacgagcgtttcggtctggctaatcatgcgccgaagaggctgcaaaagatgacgcgttttccgaacgattcgctggatgcggcgctgtgccacggcgatctgctgctgcaaatttgcgccaacacccaggatacggtgattcacgccctgcgggatgtgattaagcacaccccggatttgctcagcgtgcgctggaagcgggaagggtttatctccgacagcgccgcgcgcagcaagggtaaagagacgccggtgaatctgctgggcttcaaagacggcaccgcgaatccggtgagcaccgataaggcgctaatggataaagtggtgtgggtcaccgccgaccagggagagccagcgtgggcgacgggcggcagctatcaggtggcgcggattattcagttccacgttgagttctgggatcgcacgccgctgaaagagcagcagactatttttggccgcgataaactgagcggcgcgccgcttgggatgcagcacgagcacgatgtcccggattacagcaaagaccctgacggcgataccattgcgctcgatagccacattcgtctggcgaacccgcgtaccccggaaaccgaatccagcctgatgatgcgccggggctatagctattcgctgggggtgaccaattccggccagctggacatggggctgctgtttgtttgctaccagcacgatctggaaaaaggcttcctgacggtgcaaaagcgcctgaatggagaagcgctggaggagtacgtgaagcccattggcggcggctatttctttgttctgccgggggttatcgacggtcggcattatctcgggcaatcgctgctcgaagcctgacgtacctgcccgcaagggcagggcgttttctgctgtttttccattcattttttgtatttcctgccttgtttcatttttctgtaatcttatagtcggaaactctcctcagctgcgatgagaattatttgttgtctgtgtgtgaaaaataagttgcgcttagaattatttctgatgtacttattacaggcgcggtagttctcggcagtagtctcgtttcattatggagatcgcgaatgcccgattgctgtaacggaaaacgtcaaaccccagaccgtacttatcagcacgggagcccaacttccggccgcgattttcacaccgcaaaatccttctcctctatcaaagaaaaccagaacccaggcaaggttaccggtgcgcgtagccgtgaccctctgccaattcgtcaggcaagcaatggcttacaaggaagccaaacctcaatcgttagtgcgcataatcgcgtcgatcgtggcgcgtgtgatgtaaaccaacaacgcaaggtgctatccatgggaagacaaaaagcagtgaccagagctcgtcgtgaggccaaacgtgtgctgagacaggattcgcgaagccataagcagcgcgaagaagaatcggtcacatcgcttgtgcaaatgagtggcgtagaagccattggcatggcgcgggatagccgcgacgcatcgccaatcgaagcgcgcaatgacgctcaggcgcattatttgaatgccatcgacaataaacagctgatcttcgccacgggcgaggccgggtgcggtaagacctggattagcgcggcaaaagcagctgaagccctgatccataaggatgtggacagaattattgttacccgtcccgttctgcaggccgacgaagatctcggcttcttaccgggagatatcgccgagaagtttgctccctatttccgaccggtctatgacgtgctggtgagaaggctaggggcttcctttatgcagtactgcctgcgtccggaaatcggcaaggtggaaatcgcgccgttcgcctatatgcgcggacgtacatttgaaaatgcggtggtgattctggacgaggcccagaacgtgaccgctgcgcaaatgaagatgtttttgacccgcctcggggagaacgtgacggttatcgtcaacggcgacattacccagtgcgatttaccttcaggcgtacggtcgggtctgaccgatgcgctagcgcgttttgaagaggatgagatggtgggtattgtgcgctttacaaccgatgattgcgtgcgctcaacgctttgccagcgtgcgctgaaagcctactactgagttcttctgcgtctgcaaagcccgggtgaccgggctttgtttttgctgcactacagaagagcctgcagtgaaggagcggccatcgtggcttcaaaaggaacgatctcgactttcgctacgcccgattgctgaaatggatcccggctcagccagttttgcagcccatccatatcatcgcctttagccagaatcacgccgccggacctggggattttacgccccgaagcgagaaatattccgtcagcatagccttgctttagccattccacgtgcgcagcaagctgggcgtctacctgatcaagcggtttaacgtaagtcagaacaacaacggcaatggtgctcattttccttccttaacatttaaatgtaacgctgcagaagcttatcattcacgtgaacagggcttcaggtttttttaatcaactgacgcggtgggtgtctggacgagcgcgggagcgattaaaatgtccaggtgattgccgcggtcacggaaccttcattgcgccgtgagactatcgggctgtcagcggcgtgttctccgagccaggtatagccggcgctgagcgtggaaccccaatgctcgtcatattgatggctccaggtcagcgcgttgtcgatgccgtaaaatccgccgggtgcgcgataggggcgatagccggaacgggcgctctgccgttgatcgaccccgtaaaaggtattggcgtaccggccgtcgccaaacagcgcggcggactgtaaggcaacgatatcctgcgagttctggagcagcaggagggttgcggaggtctgataatgcacgccctgggcgtcggtgagcggaagcgtagccttaccttcaacggtgagccacggcgtgaccgaccagccgacggcgaaggcggtattcatggtggctttaatattacccatccccttcagcgtattcgccccatcgcgccagcctgagtttttttccgctcgcccgaggtcataaccgagcgtgtgctcgaagtagagaccgctgtcgccagccaggtcatagcctatgcctttttgactatcaataaagaaagcgcctttccgcccctgtagtacgggaaccacctgccaactctgcttgtcagagccgctgtaacgaggcgcgtattttccgcccaccccgatagtcagcccatcggaaggcgcggcggcttcatcggcacgcgcgccgggtgttatcgccattaaaaacggcacgaccatatacggcgaaatttttctggctatcatactgttctccacgtggacgcgggcgccgtcgataaggacgcgccgcagaatgccggtgcagtatggttttgctaaatcaatgaacggtcgggatagtgttaagaaacggtcaaggtgaacagatgttgtccagaagagtgttgataattgaagatgacgccgatgcggccggggtgcttgaggcctatttacgccgggaaaactatgatgtggcggtcaccgtggatggcctcgctggactggatatggcgcagcgctggaaacccgatctgattctgctggacgtgatgctgcccgggctgaacggcaccgaggtgctggccagcctgcggcggaaaagcgatgtgccggtgattatggttaccgcgatgggggatatgcccgatcgtattggcgcgctgcgctatggcgccgacgattatgtggtgaaaccctatcatcctggcgaggtggtggcgcgagttcaggccgtactccggcggagccgcaaagcggagacgcaggaagacattctgcgctggcaggggctggaggtggacgtcgctgccatcgtcgcggccgtcagcaatccgggggaatctgtccatgttctcgatcttaccccgaccgagttttcgcttctggctacgctgatgcgcgcccccgtccgtcccttttcgcgacagtatctgctggagcgctgccttcctgagagcgaagcgcttgagcgcgtggtggatacgcatatctataacctgcgtaaaaaactggagggggcgggggtatccggggtgctagtcaacgttcgcggcgtgggctacaggttcagacagccatgatgaagacccgtcactcctctctctggcgctggatttgcgggcgcattctggcgctggccatcggcagcgtgattgttatcgccacctgtatgtggctgcgtttcgccgtgcagaactattggatcatgcacaaaatgccgcccgctttgcgggaggaattcattgcgctcagccgcaatccggaggccaacccggcgcgttttcatcagattgtcgatacctggtggggattgagctattccacgccctctatcgcctcggcggactgggtgaccgtggcggtgctggtgctggtcatgatccccttcattgtcgttatggggctccgctatgcccgtccgctctcgctgcagttcagccgtcttcgtgatgcggcgaaggacgtcaccggggggcaatttggccgccaggcggagctgattgaggacgcgccagcggaaatgatccgctttgctgccgactttaacaaaatgaccggccagctggcccgctatgataaagaactccgcgcctcgcatgttgcgatggcgcatgagcttcgctccccgttgacggcggcgattggccgtctgcagggaatgctggatggcgtttttgatacccagccgcagcagctggagatggtgatgaaacaactccagcatctgaatcgattaaccgatgagctgcatctgctttccctggcggatgccggcaatctggtgctcgatgagcggctattttgtctggatgagctccttcaggagcgagccgcatggttaacgccgcaggcggacgcgcagagcgtgacgatcgccattcagccatcgccgtcctgtcccttccgcggcgatgcttttcgcatgggccaggtatttagcgtactgatggaaaatgccgtacgctacgggcgcagggggggacatctggcaattacgctgcgccgcggcgagggcgcttacaccattgattttgtcgatgatgggcccggcgtggcgaggcattttttaccggaaatgtttgaacgttttacccgcgaggaggcgtcccgcgccagacactccggcggcagcggcctcggattatccattgcgcgcgctatctgcgtggcgcacggggggcgcatcagcgcgtcgctaccggcgagcggcggtctgcagattcgcgttgttctgccgtacgctcccgccacagaagaaaacagcctgccttgataatcccttgacacaacatcgagccattctcgatgaatgtgtcatgtaatggcgccatttcccgaacggagtggcgtttatgttatatgagttagttctttcccttcgtcagtgcgtgtccgctttgctcggcgcagaacggacgctatcctggtttgcgctgttgccgccgatcgtactggtcctgatgatcgtaccgcttgtgggctgcggcgataaaagcgccgaaaagcccgcgccggcccgcccggtgcgctacgtggtggtgggttccccggcgacgcttcccgctctggaaagaacgggcgaaatccacgcgcatgatgagacggccctgagctttcgtacggcgggcaggatgctgacgcgcgcggtggatgtcggcgatcgggtcaactacgggcagctgctggcgacgcttgaagagaccagcgcgcgaaatcagctggacagcgcgacggctgacgatgagagcgcccgagcgaccgcccgggtcgccgcgctgaacgttaaccgcatgcagaagctcatcgccacgggcgcaatcgcccgctctcagctggacagcgcgcaggcggactggctggtcgccagcgcccgggtgaagagcagcgaggccgccttgcgcaacgccagggaaagcctgggctggacgcgtcttacttcgccgggtgagggggttatcacggcggtcagcgcctctcccggtcaggtggtcagcgccggagagacggtggtgacgctggcggcgggtcaggcgcgcgatgtggtgtttgatatcccggatcccgctaaggttgaggcgcaaagggcggaagaatttcaggttgctttgctcagcgatgccggggtgaaggcctatgctgttttgcgtgatattagcccacaggccgatccccagacccggacatggcgcgtcagggcaacgctcaagaaaccgcccgccgcgatggcgctgggcgccagcgtcacggtaaggctgccgtcatcaggctcgacgggatacgccataccggcttctgcgctgagccgctgcggagataaaccggccgtctttgtcatcaccccgcagatgcaggcgcagctgcgcgttgtcgttcccgccagctacacggcttcttccgcgatcatcgcctccggccttgtgcccggcgaccgggttattaccgccggcgttagcaaactgcgcccgggcgaaaaagtcgtcgccggagagaggctgccgtgaaaatagcgccgtcaaaaaatcgctttaacctttctgcatgggcgctggaaaacccgcaaatggtcagtttctttatgctgctgattatggttatcggttcgctcagctatacgctgctgccgcgaaatgaagatccggctttcactatcaaaacggcggtagtctcggcgcagtggccgggcgcgtcggtaacggataccacgcatctggtgacggatgtcctggagaaaaaattacaggaaacgccctggctcgattatatcgaaagtgaaacccgagccgggcaaacggttatctatattaatctccgcgatgacaccccggcgcacaacgtcccggcgatctggtaccagatccgcaaaaaaatgcaggatattgcgccatcgctgccggaaggcgcgcagggaccgagcgtgaacgatgagtttgacgacacgtacggcaccatttacggatttatccctgacggatatagccttgaagaggtgcgacagcgggtggagacgatccgccgtgaactgatgtccgtgccggatatcggcaaaacggtcctccttggcgagccgcaggagcaggtagtcatcgctttttcacccgcccggctggccggtatggggcttaccattcagcaggttgcggacgctctgaaggcccagaatgccgtggtgccggcaggaaccctgcgcaccgggcaggagaatatcacgctaaacgtcagcggggccctcaggaccgaagcgagcctgcgcgccgtcatcctgcacatcaacgatcgctatcttcccctgaccgatattgccacgattgaaagaagcgcggccgaaccaccttcagcggagtttcgcgtcaacggacgtcctgccgttgggctggcgatttccatggcgccgacgggcaatatgctgcgctttggcgagacgctgaataacagaatgcgcgccatcggcgtcgggctaccgcacggcatcgagatagttaaagtggctgaccagtcggcggtggtcagcggcgccgtaagcggatttgtccgggtactggtggaagccgtgctgattgtgctggcggtttcttttgtctcgctgggattaagggccgggctggtggtggccgcggcgatcccgctggtgctggcgatgacctttaccgggatgatgctggcaggcattggtctacagcgcatctctctcggggccctgatcgttgcgctagggctgctggtggatgatgccatgatcgccgtggaaaccatggtatcccggcttgaggccggcgatacgcgacggcaggcggcgacgtacgctttccaaaccatggcatttccgatgttgaccggtacgctggtcatgattgccggatttattcccgtcggttttgcctcatccagcgcgggcgaatactgcttttcgctgtttgccgtggtgctgatggcgcttctgaattcatgggtcgtggcgattctgttctcccctttgaccggaacgtggctgctgccggaaaagctgaaacatcgtgccgcaggcccgggccgcatggcgcggggatatggacgacttctgcgtacggtgctgcgccaccggcttgccaccctggggattgcgctggccgcgctggggctgtcggtgtacgggaccacgtttatgcagggggagtttttcccttcatctgatcgcccggagctgctggtcagcctgacgcttccggccaatgcttcgcagacggaaacggagaaacaaacggagaggctggaaagggcgctcgccgggaatcgcaacattgaccattattcgacctatattggggcgggcgccatccgcttttatctgccgatggatgttctgctggataatgaaaatacggcgcagctggtggtggtggcgaaagacctggccgcccgcgaccgcctgcgggaacagttaaacacgctgctgaccacgcaattcagcgatctgacttcgcgcgtttctcctctggagctagggcctccggtgggctggccgatcaaataccgggtcagcgggccggattatctcaaggtcagagagtatgccgggcgtctggccgaggcgatagggcgctcgccgttaacccgggaggtaaaccagaccgccggcgagccggagagaaccatcgtcctgcaggtgaaccagactgccgcgcgggcggcgggcgtgtcatcgcagagcctggcgcagacgcttaataccgtctggtcaggcacgacggtcacatcgctgagagacaatgaccggctggttgatgtggtgctgcgggcgaacgacagcgagcgattgaatcttgccaccctgtcatcgctgacggttgaagggcgcggtggagaaaaagttcccctcagcgcggtggccacgccgacctggggagtggacgatccggtgctctggcgtcggcaaagattgccgtttatcaccgtacaaaccgacctcgcgccggggatgcgggcagaaggcgtatcgaacggtctgcgcccgacggtggatcaactgcgcgcgggtttacccaccggttacagcattgtcgaaggcggggtggttgcggagtccgaaaaaggcaacagctcggtattgaatattttacccgtcaccctcggcattatgctgttattgctgatgcttcagctgcggcgctattcccgtatgctgctggctatgttcatggccccgttcggcttgccggggattgttttggctatgctgccgggcgacacgccaatgggatttgtggctctgctcggcgtcatcgcgctggcggggatgattatccgcaatgccgtgatacttatcactgaagtcgacggcaatctggcccagggcatggaaagcgatgctgctattattgccgccgcagagcaccgggccaggccgatattgctgaccgcctgcgccgcgatactgggtatggtccctatctctcaccaggtattctggggaccgatggcgtatgccatcattggcgggctgattgtcgcgacgctcgtcacgttaaccgtgctgccggcgtcctttagcctgctgctggagaggggaggataccgggaaaaacgtcccgccgcttaataacacaggatggccgggggcgaccccggtcggggtttccccccggggggtgctatatgcgaaaaaaaagcccgtacttgcgtacgagctcttcttaaaatatggcggtgagggggggattcgaacccccgatacgttgccgtatacacactttccaggcgtgctccttcagccactcggacacctcaccatattgttttgtcgctcaccttgggtgggcaacggggcgctactatagggagttgcgctaaaacggtcaagcagtatttatgctttcgctatcgttcggttaagcaatgaacactgccccgccgtagcacggcggggcagtcattttaacgctgtgaatcaagctgttcgttattcttcaccacgtcctgagctttggcgtagctctcaatcagcagctggtatgccgggaagaccttggtatacacctcggcccactcagcggcatccgggcgattccaggtgcgctgcagttcagaagcaaccgctgcggtatccatcggcacgacgccagcctggacgacgcgggcgagggtgatttcctgcgccatcttgctataggtaccggaagcatcaatgacggcaaaaaccttatagccatcggcgacggcggcaatggacgggaacgccatgcagacgctggtaatggtaccggcgataatcagcgttttacgcccggtcgcttttaccgcggcaacaaattccgggttatcccacgcgttaatctctcctttacgcgcaatatattgcgcatggggcgcgttcgcatgaatctcagggatcagcgggccgtttggtccctgcggcactgacgccgtggtgatcaccgggatcccggctaatgaagccatcttcgccagcgcggcggcgcgcgcccgcagctccggcatcggcatatcacccacggtctggaacagaccgctctggtggtcaatcagcagcatggcggtatcattgacatcaataaccggacgagaaccattaaagttagctggggtagacatattattcacctcattcaatatcaaatttggccgaagcggccgctattaaaatcacgaaccgcttccgcgatttgtgctttggtattcatcacaaaggggccgtagcccacgatcggctcctgcagcggttcaccggccatcagcagtacttttgcgttgctactggccgagaggtggagcgcttctcctttctggctgagcaccaccagctgaccctcgcgggcgctaccctcgccgttcaccaccacttcaccttccagaacgaccagcgccgtactccagccagcaggctgatgcagcgtgatttcctggctctggttaagctgcaggtcccagacgttaagcggagaaaacgtgtgcgcagggccgacaatatcttcgtagcgcccggcaataacccgcatatggcccgcattattcggcagctcaacgtcaggaatcacatcagcagtgatgctctggtatcccggctgcgtcattttgtctttcgccgggaggttgacccagagctgaatcattttcagctcgccgccggtacgggtaaattccgccgagtggaactcttcatgcaggatcccggcgcctgcggtcatccactgcacatcgcccggcccaatgacgccgcctctgccggtagagtcacgatgttcaacttcgccggaatagaccacggtgacggtttcaaatccgcgatgcggatgttcgccgacgccgcgtttgcctgtccccgccgggaagtgatgggggcctgcgtagtcgagcagcaggaaggggcttagctgttcgccgtgagtctggtaagagaacattgagcgaaccgggaaaccatcgcctacccagtgctgtgaaggcgcggtgtagatacctgtaatttgtttcatggcagtctcctgaatagctgtttctgatgtggataagcatagattcgccactaatagtccgctagatagcaaaaatgacctatactgttctaaaaatggaacgatgggggaaggatgcaggatctcaatgacttagcctggttcgtacaggtgatcgatcacggtggttttgccgcggcgggcagggcgctcgatcaacccaaatccaagttgagccgtcgtatcgcccagctagaagaacgcctcggcgtccgtttgattcaacggacaacccggcagtttgcggtaacggaagttggcctgaccttttatcagcactgcaaagcgatgctgatcgaggcggaagcggcagaacaggcggtggaaaccctgcgttccgagccgcgcgggagcgtaaagctgacctgcccggtaacgctattgcatgcgcatatcgggccgatgctggcacggtttatggtgcgctatccgggcgtgaatctgcagctggaagcgaccaaccgacgcgttgatgttgttggagagggcgtcgacgtcgcgattcgcgtacgtccaaggccgatagaagatagcgatctggtgatgcgtgttctggccgatcgcgggcaccgtctggtcgccagcccacggttggtggagcggcaggggcagcctcaggttccttcagcgctaagcgattggccggggttaagcctgggggcgggcaaacatcagcataagtggcagttgaccggcccggagggggcaagggcggaaatctactttactccccggctggtcaccacggatatgctggcgctccgtgaagcggccattgccggcgttggggtggtacagcttcctttattaatggtgcgcgatcagttggccgccggagagctggtggttgtcctcgatgagtggcaaccgcgcagggaggtgatccatgcggtgtttgcctctcgtcgcggattactcccctcggtcagggcgctggtggattttctcagcgaagagtatcagcggatggaagaggattagcatttgccacaatcccggcgctcggattaccggcaatctgcggcccggtagcccggctaagcgcagcgcaagccgggaagaagccacagcaataccgcgtcacggcatatttcccgggttgcggcgtaaacgccttacccgggctacgggctatcggcaatctgcggtactgtagcccgggcacgcgctgtgcgccgtccccgggagaagagcatggagtagcagaatttcccggaggcgatgctgcgcatctgtccgggctaccggacggagcgcagcaggcgaaaaaaaagcccatacttgcgtacgagcccttcttaaaacatggcggtgagggggggattgactcgctgcgctcgccgttactcggcccgtccctgggcctcgcccctgcggggccagcgcaggcgctgtgcaaaattgctcccggcaattttgtcggggcagattcctcgcaggctcgtcatctgtccaactggctgtcgccagttgtcgaaccccggtcggggcttctcatccccccggcggggtgctatatacgaaaaaaaagcccgtacttgcgtacgagctcttcttaaaatatggcggtgagggggggattcgaacccccgatacgttgccgtatacacactttccaggcgtgctccttcagccactcggacacctcaccatattgtctttcccgttgttgccgggaacgggcgctaatttagggaaatacgtatctcccgtcaatcaacttttttaaaaaatcgcgcgtttagccaaacttcaagcaacttgctccctaaatgggcgaaaatcgatttttttatcgccattccctttttcgcacgctcggcgaatgaaatttgctatgctggcaatctaatagaaaacaacgagtaaaacgcgacgctaacctaacctgccagcagcgtcggctatcaggagcctttatggatatcatcttttaccaccccacgttcgacatccctttttggattacggaactggaaaaacagctgcccggctcgcgcgtccgcgagtggaaacccggagatgatcaacccgctgactatgcgctggtctggcatccgccggtagaaatgctccagggccgccagcttaaagccgtctttgcccttggcgccggcgtcgattcaatcctcagcaaattgcgggaacacccggaaatgctgccgctgtcaactccgctgttccgtctggaagacaccggcatggggctgcagatgcaagaatacgcggtgagccaggtgttgcactggttccgtcgttttgatgactatcaggcattaaaacaagaggcgcggtggcagccgctggaggagtatcagcgtgaagatttcaccatcggcattatgggcgcgggcgtgcttggcgcgaaagtggccgaagccctgcaaagctggggttttccgttacgcatctggagccgcagccgcaaatcctggccgcaggtcaccagctttgccggagaagaggagctgaatgcgttcctcaacggaacacgagtgctgataaacctgctgcccaacacggcggaaaccgttggaattattaatagcgcgcgcctggcgcagctgccggataacagctacgtgctgaatctggctcgcggtgttcatgtggtggaagacgatcttctggacgcgctgaatagcggcaagttgaaaggcgcgatgctggatgtgtacagccgcgaaccgctgcctgaagcgagcccgctttggcggcatccgcgagtggcgatgacgccgcatgttgccgccgtcacccggcctctggaagccatggcttatatcgccaaaaccatcggtcagttagaacgaggtgaaacggtcagcgggcaggtcgatcgccagctgggatactaagcgacagccccgcatgagcggggtttttgctgatcacaggcgcagattcctgctattcttgccacaaacagagaaggagattgtgatgtatcctgttgacctgcacatgcataccgtcgccagcacccacgcctacagtaccctgcacgattatattgcagaagcaaagcgcaaggggatcaaactttttgccattaccgaccacgggcccgatatggccgatgcgcctcactactggcattttattaatatgcgtatctggccgcggctggtggagggcgttggtatcctgcgcggtatcgaagccaatatcaaaaatacccagggcgaaattgactgtaccggcccgatgctcaactcgctggacctgatcattgccggttttcacgagccggtgttccctccaaaggataaagcaacgcataccgaagcgatgatcgccacgatagcgagcggcgcggtgcatatcattagccatccgggtaatcctaagtttcccgttgatatcccggccattgccgcggcagcggcgaagcaccacgtggcgctggaaatcaataactcatcctttgtttcgtcgcgcattggcagcgaagataactgccgtgccgttgccgcggccgtacgcgatgccggcggctgggttgcgctgggctcggattcccatacggcattcacgcttggtgaatttagcgaatgtcgcaaaatcctcgatgctgttgattttccggaagagcgcattcttaacgtgacgccgcggcgtctgcttaattttcttgaatcgcgtgggatgcctgtgattcctgagtttgctgaactttaatttgaataactggaataaatgaatgaacgagttttcaatcctctgccgcgtgctgggctctctctattatcgtcagccgcaggacccgctgctggtgccgctgtttacccttattcgcgaagggaagctggcagcaagctggccgctggagcaggatgaactgctggagcgtctgcaaaaaagctgcgatatgccgtctctgtccgccgaatacaacgcgctgtttgtcggtgaagagtgccgcgtggcgccataccgtagcgcatgggtagaaggcgctacggaagctgacgttcgcgctttcctcagcgcgcatggtgtccccacgggggagggcgcggcggatcatttaggctccttgctgctggccgcttcgtggctggaagatcacgcgccggaagatgaaagcgacgttctggaaaccctgttcgctgagtatattctgccgtggtgcggcgagttcctgggcaaagttgaagcccatgcaaccacgccgttctggcgcgccatggccccgctgactcgtgaagccctctccgccatgtgggatgagctgcaggaagaaaatgagcaatgaattgtgattaaagtcacaatttaattgcaacaaagcattcttaatttcatttagtgtgttccgtgtcgcatttgacgggcgcgtttctgctatgatacgcgccatgaacatactcttcgcaatcgcattaacgacgggcattctctccggtatctggggatgggtggccgtcgcattgggtctgctgagctgggcaggtttcctcggctgtacggcttactttgcctgtccgcaaggtgggttaaaagggctgcttatttcgacctgtacggtcatgagcggcgtggtgtgggcgctggtgattattcacggtagcgcgctggcgccgcagctggaagtggttagctatatcatgaccggcgtcgtggcgtttttgatgtgtatccaggcgcgccagctgattctctcttttgtgccgggtacttttatcggcgcgtgtgcgacgtttgccgccggcggcgactggcgtttagttgtgccttcactcgcgctgggcctggtatttggctatgccatgaaaaatagcggcctgtggctggcgacccgggcggagaaaaataaatctctggctaatcaaagtcgcgaatctttttaacctatcccacttttttatcaccaaagagcccgtcgggctctttggctgtttttgctgccaagtattacctcatcataaatcttcccgccgttttgtttttccttatatatccgcaactttaactgtaccgggagttagtgaatcgattttgttagcacatttaaacaaatgatattttttgttttaaaattgttaatataattaaagtgaagtaaaaaaatataactcgtcgcactcatggatggctggtgctcttcagtagctataccgatatgcagaggagttttataatgaaaacaattagatatgcttcgcttgcagccctgtttatattaccctcgtttattagccctgcgatcgccgaacagaccgtggctggcgtcgtccatttttacggacgggtggtggaagcaccttgccagctcgatgcaatcaataatcaggttattatggattgcccgcgggcggagacgattaaaatttccgctcagcagcttgagaaagggaatatccgcaacgaaaatatccgttctgcgcaattacgctatattaatccgcaacggaccctcgccattctggatgttgattatcggtaaccctctgcccccgggctttcgccccgggggctatcgtgccatattatcctcctgtattcctttcaagacgtatgccgacaggaggagaaatggctgttcaacctgaagtggttctcggcgatattaccaggcttgaggtcgatgttatcgtcaacgcggctaatccgtcgctgcttggcggcggcggggtggacggggcgattcaccgcgcggcagggccggaactgctggctgcctgtaaagttgtgcggcaacagcagggagagtgtccgccgggtcatgcggtgattacggcggcaggaaatctgcccgccagcgcggtgattcacgccgtagggccggtctggcacggcggtgacaggcaggaggcggagttactggctgatgtttacaaaaatagcctgctgctggcctcggcaaataattaccgatccatcgcatttcctgctatcagcaccggcgtatatggttaccctaaacaggctgccgcggagatagccgtgcggacggtaactgcctttctcactcgctacaatccgctggagcgcgtttatttcgtttgttttgatagcgaaaccgccggcatctatacccaattactcgaggcgagtcgcgcgcaactcggccatcagaataagatatgatagtttcctgcgaaggcgggaaactatcataacgggagagtcatcggtgactgaagggaaggttctacaaaaacaacggcttcgccggatggaaattgttgccgcggcacaaaaatgtttcgcggaaaagggcctgcatggcgcctccgtagcggatattgcgcgtcaggctggccttagcgtaggccagctatatcgcgttttcgccagcaaagaagagatcatcgaagttatcgtcagcgagatcgtgaatgccagagtgggtgaaatggttgccgggaatcatgatttagcccgcatggcttcagttttagccggcgtgctccccgcgaccgagtctacgaaaaacgataattatctgctgatggaaattaacgccgaggcgtcccgaaatccgcgcctgcgtgaaattatgatccaggccgatcgtcgcctgaaagaggagggcggacggcttacccgccactatcatcctgagatgaccgcggagcaaattagcgtcgcctgcgaatttatcgcgatattaacggaaggggcggcataccgttgcgacctggcgacggccccgacggtagataaagcggcgatggagagcctgtaccgcgatgtctttcagctgttgtttgcgcaaaaatagcgctgctatgtgcgttccacacagcagctccctgttttaactggcggaaatttgcggcttagccgtcttttgctggaattttccggaaaaaagaaagcgcaacagcggtatccgcagatgaatttcatacagcaccagtgcaatcccgacaacaaaaaccagcccggtgataaatccaagggtatttgattgaatgaccggggttatccatgccccgtagagcagggtcagagggtggtgcaccaggtagataaatagcgatgcgttgacgaagtaggtcacccgcgcggactggaaattcaacaaacggtggccaagcgaaaagaccacgttgaccatccatagccccagcaccatcgtaatcatgtactccgtttcgtacatccagccatcgcccgagccgtactgctgattcagtcggtaggcgataaatcccagtaaagccgccacaaagcaccacggcgagggagtcgtgaacatcgtcttcagccgcgcgttaataaacgtctgggcgcccaggataaagaaaggcaggtagaacagcgtttgcatcacgataaagttgaacagaccgttgctgagaatgggcggatagagaataaaaatagtgcggcgaatgaccgcatacagcacgcccagagcgagaaaaatcatcgacagctggcctaatgtgacggtgtcaccaaaggtgggcgcagcggcagaacgcggtcgcgtcagccatttgaacatcaccacgcccagcgacgtcaggaccaccagcaccaacaaaaaccacagatgagagatcagctcccaggcgagggtgttgaacttgtcatagcctgacagcgtatgccagttatccgctttaccgttgacgtactgcagcataataaactgcggcagggtcaggagcgggatcgccgttaacatgggaatgccgacgcgctcaacgcgtactttccaccattttttcagcggatagcgcagaaaaagcatgtaggaaaaatagccggaaatcacaaagaagacctgcatgcgaaaggcatggatgaagtcgttaaataacgtcagccaccacgagggctcggcgctgttaacatgccagctgtggctggagtatatgagcgaaatgtgaaaagggatgcccaatagcatcagccaggcgcggatgctatcgaaaaaatattcacgctgtaccggagtattattcatacaatatcactacattctcagacaattcgtcttatcactcaacgtgataacgtttaaattctctgcaaccctacatgaactctggttaactgtctccaggataagcacgcaaagtgcaaacggggcagtaactgcgtattccctgtgccgcgatgccgaacaatgcagggattatgttgtcggaatgcctgagtttccattaaaatagatcggatcgatttaagcacacaaagggggaagtgcttacttatatgaaacataaaccacagatgatgaaaatgcgttggttaagcgcagccgtaatgttgtccctgtgtacttcatctgcatgggcattcagcattgatgacgtcgcaaaagaggcacaaacgttagccggcaaaggctttgaagcgcctaaaagtaacctgccctctgccttccgcgacatgaagtatgcggactatcagcaaattcagtttaatcacgacaaagcctattggaataatctgaaaagcccgttcaagctcgagttttatcaccagggaatgtatttcgatacgccggtcaccattaatgaagtgacggcaaccagcgtacgtaaaattaaatatagcccggactattttaattttggcaacgttcagcacgataaagacacggttaaagacctcggttttgcgggctttaaggttctgtatccgatcaacagcaaagacaagaacgatgagatcgtcagcatgctcggagccagctatttccgcgtgctcggtcagggccaggtatatgggctttctgcccgcggactggctatcgataccgcgctgccgtccggagaagagttcccgcgcttccgtgagttctggattgagcgccctaaagccaccgataaacgcctgacgatttatgcgctgcttgattccccgcgcgcaaccggcgcctatcgctttgtgatcatgcccggtcgcgataccgtggtggacgtgcagtctaaggtctatctgcgtgacaaagtcggtaaactgggcgtggcgccgttaaccagcatgttcctgttcgggccgcatcagccgtctccgaccaccaactaccgcccggcgctgcacgactccaacgggctgtccattcttgccggtaacggtgagtggatctggcgtccgctcaataacccgaaacacctggccgtcagcagctacgcaatggaaaacccgcaggggtttggcctgctgcagcgcggccgtcagttctctcgttttgaagacctcgacgaccgctacgacctgcgcccaagcgcgtggattacgccgaaaggtgattggggcaaagggaaaatcgaactggtcgagatcccgaccaacgatgaaaccaacgataacatcgtcacctactggacgccggatcagctgccggaacccggcaaagagatgaacttcaaatacaccatcactttcagccgtgacgaagacaaactgcatgcgccggataacgcttacgttatgcagacccgccgttctaccggcgacgtcaagcaatcgaacctgatccgccagcctgatggcaccattgcctttattgtcgatttcaccggcgccgagatgaaaaagctgcccgcagatacgccagtgactgcccaggccagcatcggcgataacgctgaaatcgtcgaaaataccgtgcgctacaacccagtaacgaaaggctggcgtatgatcctgcgcgtcaaagtgaaagatcctaagaaaaccacggatatgcgcgcagccctggtcaataccgaccagacgctgagcgaaacctggagctatcagctgcctgccaatgaataagataacgaagtacatcgacgcattgccgctgtcggatgcagaaaaacgcgcgttacctgacgcaagtctgcaggccgtacatcaagcactggacgctgaacatcacgtttaccaccgcgaagacgactccccgctggggtcggtaaaatcgcggctggagcacagctggccagattcactggccggtaaccagctggttaaggatgacgaagggcgcacccagctcaacgccatgccgaaagcaaaacgctcctccatgtttccggacccctggcggactaacccggtcgggcgcttctgggatcggctgcgcggacgcgacgtgacgccgcgctatctttctcgcctgagccaggaagagcaggagagcgagcagaaatggcgtaccgtcggctctatccgccgctacattcttctgctgctgacgctggcgcagaccgtggtggcgacgtggtatatgaaaaccattttgccctaccagggctgggcgctgattaacccggcggatatggtggggcagaacctgtggatctcctttatgcagctgctgccctatgtgctgcagtcggggatcctgatcctgttcgccgtgcttttttgctgggtctcagcgggattctggaccgcgctgatgggcttcctgcagctgctcatcgggcgtgataagtacagtatctcagcctcgaccgtcgggaatgagccgttgaacccggagcatcgcacggcgctgatcatgccgatctgcaacgaagacgttgaccgcgtattcgcgggcctgcgtgcgacctgggagtcggtaaaggccagcggcaacgctgagcactttgatgtctatatcctgagcgatagctataacccggatatctgcgtggcagagcaaaaggcgtggatggagctcattgccgaagtgcagggcgaagggcagatcttctatcgccgccgccgccgccgcgtgaagcgcaaaagcggtaacattgatgacttctgccgccgttggggtagccagtatagctacatggtggtgctggatgccgactccgtcatgagcggtgagtgcctgagcggcctggtgcgcctgatggaagcgaacccgaatgccggtatcatccagtcatcgcctcgcgcgtcgggcatggatacgctgtatgctcgctgtcagcaatttgccacccgcgtctacggcccgctgtttaccgccgggctgcacttctggcagctgggcgaatcgcactactggggacacaacgccattatccgggtgaaaccgtttattgagcactgtgccctcgcgccgctgccgggtgagggtaacttcgcgggttccattctgtcgcacgacttcgtcgaagccgcattgatgcgtcgcgccggatggggggtctggattgcttacgatctccccggatcttatgaagagctgccgccgaacctgctggacgagctgaagcgcgatcgccgctggtgtcaggggaacctgatgaacttccgcctgttcctggttaaagggatgcacccggttcaccgcgcggtgttcctgaccggcgtgatgtcatacctgtcggcgccgctgtggtttatgttccttgcgctctcaactgccctgcaggtggtgcatgcgttgaccgaaccgcagtactttctgcagccgcggcagctgttcccggtctggccgcagtggcgtccggagctggccattgccctgtttgcttccaccatggtgctgctgtttctgccgaagctgctgagtattatcctggtgtggtgtaaagggccaaaagagtacggcggatttatccgcgtgaccctttctctgctgctggaggtgctcttttcggtgctgctggcgccggtgcgtatgctgttccataccgtatttgtggtcagcgcgttcctcggctgggaagtggtgtggaactcgccgcagcgtgatgacgactctaccccgtggggcgaagcgtttatgcgtcacggctcgcagatgctgttgggtctggtctgggcggtgggcatggcatggctggatctgcgcttcctgttctggctggcgccgattgtggtgtcgctgattctgtcgccgttcgtgtcggccatttccagccgcgccaccatcggcctgcgcactaaacgctggaagctgttcctgatcccggaagagtactccccgccgcaggtgcttaaagatactgacgcttacctgacgctcaaccgtcagcgttcgctggacgacggctttatgcatgcggtatttaacccgtcgtttaacgcgctggcaacggcgatggccaccgcgcgccaccgtcacgggcatattctggatatcgctcgcgaacgtcacgttgagcaggcgttgaatgagacgccggataaactaaaccgcgatcgtcgtctggtattgctgagcgacccggtcacgatgtcacgcttgcactatcgcgtgtgggccgcgccggagaaatactcttcgtgggtcggcgcctatcagcagctgacgttgaatccgctggcgttaaaaacgaagtaagccgtacgttaaggaaaataccggcaatggcgccggtatttttttacctgaaaatcgaggttgttgatgagagttttactggttatcgcaatgacgctgtttctcagcggctgcgggagtattatcagccgcacagtgccaggccagggccatggaaaccagtactatcccggcgttcagtgggatgttcgtgattcagcatggcgctatatcactattctcgatctgcccttttcgctggtgtttgatacgctactgctgccgcttgacgccagccatggtccctataactaattagcgttcatcccattcatcggcggcagcctggccctcctcggtatcgagagagggttcaagctgaaactcgccttcatcccattcgtgcagcgtgttttcttccagccactcctggcgaagctcaatctcatcataatcaccgtcaaagacgctctgcgcagcctgaccgctgaggaccggcagacattcgccctgttcatcctcgtcggcgaaaaattcggcctgccaggcaatatcaccgtcctggagtacgtacttctggatatttaactgctcaatgctggcgctctcttcgtcgctatcgggattattagccagaaactcctcgcgggctgcatcgattgcttcttcaagcgtggcatagaacatcgaatcctttggcatggctaacctcctaagatgaatagaaatgaacacgattcaatctatagaaggcggttggcaatgcgtcaaggaggtgaacgccacacggacattaatttaccgaatgcgtgccggaacccggattgtccgttgcccgggggcggcgggagcgaccgagggtcagggttgagtagaccgcattgaacagcaccacaccggcggtgactaaaaagactgcccggaagccgtagttggcggaaaccgatgcgccgatgagcgggcccgtgacgttgccgatatcgcggaacgactggttatagctgaatattctgcccgagatttggctggtggagttgtacaccagcagcgtttgcactgccggcagcagcgcgccgtcggcggcacctaacaggaagcgcaggatacccagctgcagcggcgtctggacgaacgacatgggaatcaggagcaggacagaaatcaccagcgcgacgatcaggattttttccggaccgatacggtcgccgagtttaccgaggcgaggggcgctaagcagggcggcaataccggggactgaagctatcatgccgctgataaacgcaatattactgacgttgccggcgagatcgcgcacgtaaagcgtcaaaatcggcgcgatggaaccggtagccacctggataatcagcgatgtcacaaacagactcagcaccagtttcggatttttaagcgacgtgaaaacgtctttcgcgctgagcatctcttttttactgacggcgacaaagttctcgcggatgagaaaaagggtaaataagaaacaaataaacagcacgcctgccgtcataaagaagacggtacgcaatccccagtgatcggccaggaaaccaccggccagcggccccagcagcgcgccgctgaccgccccggtagagagggtccccagcgcccagccgctcttatgacggggaatttgcgtcgctatcagcgcattggcgttaggaataaatccgccgagcagacctaacagcgcgcgcaggatcagaaactgccagatattctgcgccaggcccatcagcagcataacgattgccataccgagggccgagcgcagcagcataattttgcgtcctttgcggtccgcgagaccgccccagaagggggaggccacggcggaaaataaaaaggtaatgctgaaaaccagccctgaccacatattgagggcgctatggccggttacgccgagttgttcgacgtagagagggaggaacggcatcaccaggctaaaggcggcgccggttaaaaagcagccgagccaggtgacggtgagattacgtttccagttaatgggggtatcagcagagggcataggtttccactgacctgccgcgcaggtcaaataattgaaaatatgagcctgctaattatgcgcctgagaaatggttgccgcaatggaggagagcttttaaagctaaaggagggctctgaacggcggggcttaccccgcatccggattcagatgcggggtcattgcgcgagcgcgcgccgggaggcgctagtaacgagaaggaacgccttcaggacgcgttttaaagcggcgatgcatccacatatactgttccggcgccatcaatatgcacttctctaccactttgttcatccagacggcggtagtctccgcatcgtccagcggcggatcgcactccggcggcaggataatcagctcatagcctttaccgtccggtttacggcgcggcacgaacggcacaacgcaggctttagacatctttgccagcatccaggtgcccgaggtggtcgcggcctggtcaacggcgaaaaacggcacaaatacgctggcggccgggccatagtcgtgatccggcgcataccagatcacttcaccctttttcagcgcgcggatcatgcctttcagatctttacgatcgatcatgtctttgttggagcgcaggcgtccccatgtctgcagccagtcgataaccgggttatcgtttggacgataaacgccaatgcccggctcgttgataccgaacatgcgcgcgcccatctccagcgtgaggaaatgaatgccaatcagcaaaatgccgcgcttttgcgcctgaacatcacggatatgctcgacgccgatggagtcagtccagcgcgcaatacgcttcgtcggccagaaccaggccatgccggtttccattaaccccatgccgacggattcaaagtttgccacgaccatgcggtgacgctcttgctcgctcttatcgggaaaacagagctccagattccggttggctattttggcccggcgcttcattagccgcatggcgaggcggccaagaccggttccgaggcgataaatcagcggataaggcagctgaacaaccaaccagagcaggccgatcccgagccaaagcaaccagtaacgcgggtgcagcaacgctgcggaaaatttaggtaaatgggtcatctcatacctgtttaattaagcaacgtgttctattatcgcatttttttatgcctcagccaaaataccggccgcagatggcatttaatgttaacgcaagcaaatatgggtgagaaaaatgtagcgcaaaatgtggggatgtaaattaagcgtgtttgctatatgatgcccgccgtttattttactcattgactatgccgagcaggtacaccatgccagtgttacataaccgcatttcaaatgagacgttaaaggcgcaaatgttggctgagaccgagccgcgcacgacgatctcgttttataaatatttcactattatcgacccaaaagccacgcgcgatgcgctgtggattgcgttgactaagctgaacgtctttggccgaatttatctggctcacgaaggtattaacgcgcaaattagcgttccgcaaagccgggtcgatgcgctgcgcgaattcttatacgcttttgatcctgccctgaatggtctgcgcctgaatatcgccctcgatgatgacggtaaatccttctgggttctgcgtctcaaggtacgcgatcggatcgtcgcggatgggattgacgatccgacgtttgatgcatcggacgtgggcgattatttaaaggctgcggaagtcaacgcgatgctggacgacccggatgcggtctttattgatatgcgtaaccattacgaatatgaggtcggccatttcgagaatgcgctggagatcccggcggatacgtttcgcgaccagctgccgaaggccgttgagatgatgcaggaacataaagataaaaatatcgtgatgtactgcaccggcggtatccgctgcgaaaaagccagcgcgtggatgaagcacaatgggttcactaaggtctcgcatattgagggcgggattatcgaatacgcgcgacgcgcacgcgaacaggggctgccggttcgctttgtcggtaagaactttgtcttcgatgagcgtatgggagagcgtatctcagatgatgttatcgcccattgccatcagtgcggcgccccctgcgacagccataccaactgcctgaacgatggttgccacctgctgtttattcagtgtcctgcctgcgcggagaaattcgccggctgctgtagcgaagcctgcatggaagagcataagctgccggaagaggagcagcgaaaactgcgcgccggccgcgagaatggcaataagatctttaataaatctcgcggtcggttgaatacgaagctggggatcccggatcctgagccttcagaaaaaccatagccagataagatcgataaacgccagcagaagccacagcgccagataaatcataaaatgttcgcggacgttgttaaccagtaattcgaacaggcgacgcatcatctctctcatcattcacggcctcaagcgaggccgtttctttagcgtggttgtcaggttgtacggcgggcgcttatttcttaaaccgcgccagtgaaaacggggatagatcaaacccaaagggttcttcaagcgcaaaccgtgtggccagttcaccgagtaccggtgcgaacttaaagccgtgcccgctcaggccggtaatcaatagcgtatccggctggccgggcagcgtatcaatgataaagtcctcgtcggcggtgttgtcataggtacaggatgcgccatgcaggcagccgccgataccgggcaacacattacgcaagaagctaaaagcttcagagccgtccgttgcaacggcaccaaacggcttacgctcttccggcgtggaaataggctgcccgccgttatgcttgccgattttcaattcgttatcttctgccgggaaaccgtaaaactgatcgccattcgctaactcaccggtaaacgccgggaaattatttttgctgctgtagcggccatccgcctgaaaccaggcgaaaattttacgtaccggctggacagggagttctggcatcagccgggtaacccaggtaccggcgctaaccagcagttttttgccgctgtactcaccatcaatcgtctcgacggttacgccgttcggcgcgtggtgaatggccgataccgggcagttgaagagctgtgcggcgcccgcttcgcgtgccagacggatccagctttcaacggccagttcgctgcgcagtatgccggatgcgggttcaaatattgcccgataatcatcaggaatacgaatttccggccagcgagtcatcaccgtctgcgcatccatttcttcgatattgagctggaactcgcgcgcgctgctggcaacattgcgcagaaagtcggaaccggcaggcccgaggttaatcactcctgtacgttcaaagacggcttcaccgctggcggcggcaaactcatcccatagctgttgcgcgcgcagtaccagggggacatatctttcgccttcgccgtaggcgtgacgaatgaggcgggtgctgccgtgatggctgccttcctgatgcggcggctgatgggcatcaatcatcagtacgttgagccctgcctgccgcgcataatagcctgcggcagcgccgaccgagccgctaccgataatgataagatcgtattgcatggtgagttccaggttattgctttattagcagggtaattaacaacctgctgttatacaagcccgaaaataattcaggcacccgagggtgcctgttaagtgaatattctgacattagcgctaaattttaatgccttcgatactcattttcctggtattcgccagattcaatcttcgcaatacctgcttccagaatcgaaataaactgacgtgcgacgtccgtcgttagccatagcgtctggccaatctctgcgtctctactgctttcttgagcggggttttggtagtgcaggcgcaacatcagcgcatcgtaactatcaacggtgctgatgtcccatccgacgaggggatgggtctggatgacttcattattcttttccatcataaccccttattcatatgttaaaagacaacagttctcgaggtttaatgcgtgttttttgaagcaagttaattatatcagtagtcaagaataaactcgagaaattaaatgaaatagagacacatacgcgcccatgtgctgattttttaggcaaatcagggagggttatttgttatttatgaaggtgctaaggaaaagcaataggggagagtctgactatgaaaaaaataaaaaagccggggcgacccggcaaaaaattgcacaatgagggagcaaatttaattgactagtcgcggacaaaccagtcgtcagcgctttcccaggtttcttgcaggatttcgctaatccggtctttgtcttctttcaggccgccgataaccgacagattgttattagccgcgtaccgaaccgttacctgacttgaggtagagggaaactgctgttcgatacgacgcgagagttcattgttcagcgcatctaaggcgccgttgggtaaggctgttgatttggcgatagagacttcaatacgcataattgccccctggataatgtactgtttatttatacagtacactctgaagatttacaacagggggcaggctatttattttttcatcgtccagcgcacggtttccccggcaaggaacggcaccagcgcgtcgcctggcagggcgatactctcgaccacctggctctcttcgcgcaccagctccacgtagccctcattgaccggcaggccatagaagcgggggccgttaagcgaacagaaggcttcaaagtgttgcagggcgttcatctcctcaaataccgtggcgtagctgcccagcgcggtcggcgcgttaaaacagcctgcgcatccgcagctggcttccttacgatggcgggcatggggagcggaatccgtgccgaggaaagcgcggtcaaaaccgctggcaaccagttcgcgcagcgcctgctggtgaatattgcgtttcaggatcggcaggcaataaaggtggggacgcacgccgccaaccagcatatggttgcgattgaacatcaggtgctgcggagtgatggtggccgccagcagctcgttaccgtcgcgtacgtattcagcggcatctttggtcgtgatgtgttcgaagaccaccttcaggcctggcaggcgctgacgcagcggctccatgaccgtttcaataaagcgcgcttcccggtcaaaaatatcgatatcagcatgggtgacctcaccgtgaaccagcagaggcatccccagcttttccatgcgttccagcaccggcataatggcatccgtactggtgacgccgtggctggagttggttgtagcgttggccggatagagcttggcggcagtgaatacgccttcgttaaatccgcgctccagctcagccgggtcgagcgtatccgtcagatagcaggtcatcagcggcgtaaaatcatggcccgcagggatcgcatcaacgatacgctggcgatagtcgagggcagcttcgacggtagtgacaggcggtaccaggtttggcatcacgattgcccggccataaaattcactggtataaggcacgacgatttttaacatatcgtcatcgcgcagatggatatgccagtcatcagggcggcggattttcaatacctgggattgtgctgtcatggaaggctccggctaataggttcagtcatcagggctgtttttgccgggcactaaggataagcgtaaacgttttcctttgcatcaacttccgtaaaaaatcgggcgcttcagcgcccgagccatcagttggtgaacgggataataatctcgccgggcttcacttcaatccctttagcatactttttcgccagcgcttcaccggtgctggcatcctcgcgcaggacgtaggcaggctgctgattgaagtagctacgcagggactgattcaggtaagggatcagcgtctgtacgacagactggagcttttccggctgaactttagcatcgacgacttccatctcctgcaggaaaatggcccccttttctttattgaaagccggcagcgctttgagcttcagatcgatggtcgctttctggttcccgaaaagtgaattcagatctaaattggccacgccgcttaacgtgactttgtttggttcttcacggccaatagcgctggtaagattttgcagttcaatatgggcatccgctacgcctggcaggccaatatccttagcgaagtggttacgtttctgcagcgcctgattgatttcctgctcgctcacggaatattgcgtgagctgattacaggcgctaagcaggccgctaacgataagcgcggccgcgataaacatctttttcattggattccttaatgtcatgccatgggttcatcctgacacaaagcagcatggcccgccagcgcaggaggtgctagcggaaaagactgaaaaagaggcgttcggcagcgaagggctaaaccatccgctgccttgaggctaaatagccattgaggaaagcaggttgatctgcgtctgtttggccatgttgtcacgataggcggccacccgactcggccagttcacgccggcaaccagcgtcagattcctcagcagaggaaagagctgaatatcatcttcagagagttctccgttgacggcgttcggctggacaatcagtttatccagcgcccgcagatcgtcgctgatgttcttcaccagaccggaggaatgggcgagatggtcggcaaagctgccgatagccgcctctttctttttcacaaaataggcgcgcgcctctggcgtggcgaattcatcaaacgcggatttggcaaagcgggggatcagcaggcggttcgcgtagccgttgaccttccgcagccaggtttccaccgccggattacgcgggccggtaagcagcggtttgccgtccagcttatcgacatagtgcacgatatccatgctttccggcatatagcggctatcgtctttttgcaggattggcgccattttctggccgatcattcgggtgggggttaattcatcatcgttcaggagcacaatcagttcgacggggatatttttcaggccgaaaatcatgcgggctttaaggcagaacgggcagtgatcgtagatatataacttcacgtttctcctccattgttgctgaacatcctcaattcagtatggaggagaaacgaaggcccggcaaatcaggttcgcggctccagcattccggaggccgaacgttttggactgaactgccaccacagcgcaataaacgtcgcgaggccgataatgcccagcatcagccacggcagttcaggctgaccgacggccttaccggcatcgaacagccagccgccgcctgcgtagccgaaagcgccgccgaaggccaggcctaaccggctaaagcccatatagctgccgcgcgctctggcatccgccagcgacgcccccagcgtttcacgcgcgggttcagcgatgattgaccccatataaaatacgcagatcagcgtaaacagctgctgcaaattgctgctcaggccaattggcatcatcgcgagcgtcatgatcagcaggccggccatcaggcgctgctccaggcgaaaacgcttttcgctccagcgggcaatcggatacagcagcgttagcgaaatggtcgcttcaatggcgtacatccatttgaccgccgccggagaacccgcaatatcattaaccataatcggcagcatcagcatcacctgcaccgccagcatgtaatacccggtcagcgtcagcacataggtgacaaagcgtttgtcgcgcagcacgcgccccagtccttcacgaaccggcgttttgaccgtcgacagcttccatgcgggaagataccaggcgttgaatgccgcacaggcgataaacagcgccgccccggcgctgcacaccaggcgaaaatcatattgcagcagccagctgcccagcagcgcgccgatcaccgctcctgcgctgtcctgcatcatcaggatagagaagaaacgtccgcgctggtgcgggcgtaccagcttgaccaccagcgccgcccgcgggggatcgaacagcgtgccgccgaggcctgaaagaatacaggagagccacagcacccagggttcatgagcgacggccatcgccgcgaagccggccgcgcgcatcagcataccggtaacgatcatcggcttggcgccaaaacggtcggcaatggcgccgccaaatattcctaagccttgctgcaccagctgacgcaggccgagcgcaatcccgaccatcagcgcagcccatcccatctggtcgacaaagcgaatggagataagcgggaacacaacgaaaaagccgagtacgaccagcatgttatcgactaacaggaaatatttacccaggctccttgcctgcgatacgcgggacatttcccctccagggaaaaataagaataagctctgacattttgcggggttaatggctattttcccagcgcgctcgcgacaatatttttttatcaaaatgcaagaacgatagaggctattcatcgaaaagcagagatggtgcagaaaatggtatgttgctgttttcacaccgccgtgcaggacaggtatagtaaagtcagcaagtattgcgtcaggggaacaggagaggggaatgtttggctatcgcagtaacgtaccgaaggtgcgtttgacgacggaccggctggtggttcggctggtgcacgatcgtgacgcctggcgtctggccgattattacgcggaaaataaagggttcttaaaaccctgggaaccggtgcgcgatgacagccactgttatccttccggctggcaggcgcgtttatcgatgatttctgagtttcataagcagggctcggcgttctattttgctctgcttgacccggaagaaaaagagatcatcggcgtggcgaatttttcgaacgtggtgcgcggatcgtttcatgcctgctatctcggctactccatcggggagaaatggcaagggcaggggctgatgtatgaagcgctgacgtcggccattcgctatatgcagcgcacgcaacatatccatcgcataatggcaaactatatgccgcataatcagcgcagcggcgatttgctggcgcgtctgggctttgaaaaagagggttacgccaaagattacctgctcattgatgggcagtggcgcgatcacgtactgacggcgttgacgacaccggactggaccccgggtcgctaaggagacatcatgaaatatcagttaaccgcgcatgaggcgcgggtcattggctgcctgctggaaaagcaggtcaccacgccggagcagtaccccctgtcggtcaacgcggtggtcaccgcctgtaaccagaaaacaaaccgtgaaccggtaatgtcgctcagcgaaagtgaagttcaggatctgctcgatacgctagtcaagcgccattatttgcgtacggtcagcggtttcggcaatcgggtgaccaagtatgaacaacgcttctgcaactctgaattcggcgatctgaaattcacgccggcggaagtcgctatcgtgaccacactgctgctgcgcggggcgcagacgcctggcgaactccgcggtcgcgcgcagcgaatgcatgaattcagcgatatggccgaggttgaaagcgtcctcgaaaacctggcttcgcgagaagatggcccctacgttgcgcgtctgccgcgggagcctggcaagcgtgaaagccgctatatgcatctgttctgcgatgatatggattcactgattaccgtcgtggaggccgtgtcgccgcccggcgacgatcttcagatgcgcgttgaggcgctggaggcggaagttgccgagctgaaagcgcgtctcgattcactgctggctcacctgggagattaagcatgtcggcgaaactacgtataggagtggttggcctgggcggtatcgcgcaaaaggcgtggttaccggtgctgggggccgccgatgactggacgctacaggcggcgtggtcgcccgggaaagagaaagcgctgcgtatctgtgaaacctggcgtattccctatgcggattctctggaacagctggcggcgcagtgtgatgccgtattcgtgcatacttcaacggcttcacattatgaagtggtttcccgcctgctcaatgccggagtgcatgtctgcgttgataaaccgctggcggataaactcagcgatgcggaggcgctggttgagctggccgctcgccgtcatctcacgctaatggtcgggtttaaccgccgttttgcccccctctatcgcgagctgaaggcccagctcgggagcgctgcgtcgctgcggatggataagcaccgtagcgacagcgtgggccacgatctgcgcttcacgctgttggatgactatctgcacgtcgtcgataccgcgctatggctggcgggcgataaagcgcgtttaaacggcggtacgctgcacaccaccgctcaaggggagatgctgtatgccgaacaccatttcagttgcggaatgatgcagataaccaccagtatgcaccgccgcgccggaagccagcgggagtgggtacaggcggtgaccgacggcggattatatgaagtccgggatatgcgggagtggcaggaggagcggggacgcggcgtgatccagcgcccgatccctggctggcagaccacccttgagcagcgtggatttaccggctgcgcgcggcattttatcgaatgcgtgcaaaatcagacggttcctgaaacgtccggcgagcaggcgctgcttgctcagcgcgttatagagaaactgtggcgcgaagcgatgagcgaataatccgttgtaacaactgacagtagtaattcattatgaacccggtagactatcgccactttccagcgcccgcatttgcgggcgttttactccagggttgtggaataacacgttaatgaatcttttaaaatcactggcggccgtcagttcgatgaccatgttttcgcgcgtgctgggctttgcgcgcgatgcgattgtggcgcgtatttttggcgcggggatggccaccgacgccttcttcgttgcttttaaactcccgaaccttttacggcgtatttttgctgaaggcgctttctcacaggcttttgtgccgattctggcggagtataaaagcaagcagggtgaagatgcgacccgggttttcgtcgcctatgtttcggggctgctgacgctggtgctggcgctggtcaccgtcgccggtatgctggcggcaccgtgggtgattactatcaccgcgccgggatttgccaatacgcccgaaaagttcgccctgaccacgcagcttttgcgcatcacttttccctatattctgttgatctccctggcttcactcgtgggcgccatcctgaatacctggaaccgcttttcggtgcctgcttttgccccgaccttcctgaacgtcagcatgattggttttgcgctgtttgccgcgccctattttaatccgccgatgctggcaatggcgtgggcggtaacggttggcggtattttgcagctcgcctggcagctgccgcatctgaaaaaaatcggcatgctggtgctgccgcgggtcaaccttaaagatgctggcgcagtgcgggtggtaaaacagatgggcccggcgattctcggcgtctccgtcagccaaatctcgctgatcattaacacgatttttgcctcattcctcgtttccggctccgtatcgtggatgtactacgccgatcgtctgatggagtttccgtccggcgtactgggcgtggcgctggggaccattttgctgccttcgctgtctaaaagcttcgccagcggcaatcacgatgaatattgccgtttgatggactggggattacgcctgtgcttcctgctcgcgctaccgagcgcggtggcgttagggatcctggccaagccgctgacggtcgcgttattccagtacgggaaatttaccgcttttgatgccgcgatgacccagcgcgcgctggtggcatattctgtcgggctgatggggctcatcatcgtgaaggtgctggctcccggattctattcgcggcaggacattaaaacgccggtgaaaattgccatcgtcacgctgatcatgacgcaggtgatgaacctcgcctttattggccccctgaagcacgctggtctgtcgttgtcgattggtctggcggcctgcctgaacgccgcgctgctctactggcagctgcggaaacagaaaatttttacgcctcagccgggctggttcctgttcctgctgcgcctggtcatcgcggtgattattatgtcagcggcgctgctgggcgtgatgtacctgatgccggagtggtcgcaggggacgatgccgttccgcctgctgcgcttgatggttgtcgtggtggccggcgttgtcgcctatttcgcgacgctgctgctgctgggctttcgcgtgaaagagtttgctcgccgcacggtttgagttgttctgatgaaagaaaagccgctctgcaggaattgcacagcggctttttttacctgacggttcgctctttatctggcggttcgctgcgccgatacgaccctggcgctttccagcaggcggatcccaagggcaatcgcaccggttacgacggcgagggtcaccacgccgctccagcctgcgagcacatacagtttgcttcccagtactgaacccagcgacatcccaataaacacgccggtgaacagcagcgcgttgaggcgtccgcgcgcctgcggctccaggccatacaccaggttctggtgcgctacgaggctggattgcagccccaggtcaaaaccgacggccgagatggcaatcaggattagctgaccatgtggcggtagcgcaggcagcaaaaacatcagggcaaacgaaaccgtcaccagcgccgcgcccatttgcgtgactttttctgcgccgaacttgtcggccaggccgccggccagcggggcggcaagcgccccggcagcccctgcaataccgaagccaccggctaccgcgctgcccatctgatagtgcgccaacagcatgaccgcaagcgtagaccagaaggcactaaaggcgatagagaggaatccctgggcgaatgcggcgcgacgcagtgccggatagcgtttccacagatgcgccatcgatttcatcagctgcgggtagctgagggttgagtgaatttcgaagcgcggcagcacgcgccacatcaccacgccaatcatcgcaatgctgaccgcagccgcctgatacattacccgccagccgaatagcgcccccaccagaccactaacggttcgcgacagcaggatccccagcagcaggccggtcatcaccgtacccaccattttcccctgcttgcccgcgggagccagaatcgcggctgccggtacgatatcctgcgccatggtcgcggccataccgataagcaggctgacaatcagcagggagcttagctgaccggtaaggctgcagagcagcaacaggacggccagcgcggcgcttttcatcaggatcagctttctgcggtcgtggcggtcgccaagcgggagaaggaaaagtatgcccagcgcgtagccggcctgggtcagggtcggaaccagacccataccctcaacgctcaaatggaggttagcccccatcagcggcagcagcggttgcgcgtaatagattgaggcgacgctgaagcccgcgcccagcgcaaggatgaaaatgacccacccggcggcgcgggaggtgagtggagttggtgtcatggtggattcctcttagaagcgatggcgctatttttcccgtaatccggctggcgcggtagatagcccggtggtaaaacggttatacgctaaacgtataggcaaaatataaatgaagaagcaagagcgtatagatcgtatcgaactgatgcgtacgttcattcgtatcgtggaggccggctctctctccgccgccgcggtacagatgaatacgacccaggcgacggtaagtcgacggcttcagtctctggaggggctgcttggcgcaaagctgattctgcgcacgacccacgcgatgaagctgaccgatgacggtgagcgctgttatcagcatgcccgccaggtcgtcgatgcctggctggcgctggaggacgacctgcggatcaccgatgaccggccggtggggattttaagggtgcgggccccgcatgcgtttggtcagcaacagctgctggggccgctggtggattttttgcagcgctatccccagctggcggttgaatggatgctgaacgataagacggtcgattttctgagcgatggtatcgactgcgcgattcgcgtgggggctgaggtggatccggctacggtatcggtactgctggccgaggttccccgcagcgtggtggcatccccatcgctgctggcgaacttgccgccgttaagcgcgccgcaggagatgtcgttgctgccgtggatagccatcagcacgttctatcagcatgaggtgaggctgcagtcgcaggtggatgagcagcttattacctttgccatcgcgccgtgtctgagtaccgatagcgtgcatgtggcgcgtaataccgcgctggcggggctgggcgcggcgattgtgtcgagctgggcggtagcggacgatattgccgccgggcggctggtggagctgttcccgcagtggcgagcctcaccgctgccggtacacctggtgtatccctgggcgcgctactatccgacgcggttgcgtaagtttctcgatctgatgcgtgaggtcatgccgcagattgcggggatgcagcgtccggaaggggaataaaaaaagaccggcgcgggggccggtcttgtcgaggtgacgttactctacgggctgcggacgggtaggtccggcagcggctttgtgcgtggcgctatgaccgccagcagaacctttaccgtcaaaatcaaagttcgggcgaacccactcgctttgacgaggcgcttcaggtacgtagtctggcgctggggcgcgggtcatcggcgccgtggcgtgacgattggcgaccttaacgaccggcgcagccgtgacaacaggttgagtcgcaacgaccggctccgcctctggtgcaggttcaaccaccggttcggaaacaacaggcgcttcctcaacaaccaccgccgtctcttcaaccgcaacaggttcagcgaccgcagcttccggttcgacagcttcttgcgcaacgacgtcaacggcttctgcgacaacttcttcggccacggcttcatcggcttcggcaatcagctgcggctgttcatcaaccggggcggcgatagcctccggatgcgtggtttctacgaccggaacttcaggttcgctaatcaccgccacaggctcggaagtggccactggctcgactgcgctttctgcggcgacagccggggcaatcacttcagagacaaccggctcagcggcagccactggcgcgacgacgggctcagccgcagtggttgagaactcctgaacctgcacgtcttcctgctgctggtcctgagggcgaacgaccgggtagcggatccacactttaccagacgccatttccggcgatgcgcaggctacggtcagcggcatcggggattgcgtcgggtaacgctcatcacggtagcgacgacggcgctggccgctgacgcgcaggtgacgaggggaacgacgtgaacgacgcggcataccgttagattcgcgggcttcaccgttctcatcatgttccgcagtggtttcaacaaccgccggcaggtcgactttcgccagttcagtgcgcggcgctgcggcttccggctggacgaccggcgcttcggcgacctgaggcgcggctaccggctcgacaacctgttcagcggcagcagattcaatacgcaccttctgcgccagctggcgaggtttacgacgcggcatcgtctgcacgcgctcttcctgctcgctctcctgaacaaccggctcttcgcgggtttgcgctttggcttcctgctgaacctgacgtttatcatcgttacgacggcgattacgttcgcggcgcggctgctgctcgtcgcgcgctttgcctttttcgctatcttcgaccgttgtctggcggatttcgcgcggctcagcgttctgctgctgcttctcacgacggttgcggcggttttcttcacgagactcgcggccttcgctgttctcggcacgactatcgcggttctcgcggctatcgcgattatcccggttgtcgcggcggtcattgcgatcgcggcggttgttggaacgcggtttacgacgctcctgctgacgctcggatttctcttccgcttttttctcaacctgaacttccgccggtttagtctcttcctcgctggagaacacttttttcagcgcgctgaagaagcgggcaaccaggccaggctgcgccggcgctgccgccttcggtgcggatgcggcaggcgcaacggtagccgcggctctggccggctcttcctgggccggagccggaggcgcgtcaggcatgacaaaagcagccagcgccggttgttccgggagtttacgctcggccggctcttcatcagaaggcatggccatctcttcttcgtgcagtttcggcagcagatagctcagcgtggaggtctcttcgcctttacgcacgcgcagaacagagtagtgcggcgtttccatctggtcgtttggcacgataataacgcgcacatcggcctgacgggtttcaatcgcgcttaccgcggcacgtttttcgttcagcaggtaagaggcaatcggcaccggtacgatagcgtgaacttctttggtgttctctttcagcgcttcttcttcgatcaaacgcagaatagaaagcgacagcgattcgttatcgcgcacggtacccgttccgctacagcgcgggcagacgtgatggctggactccccgagcgacgggctcaggcgctgacgcgacatctccagcagtccaaagcgggaaatatggctgatctggatgcgcgctctgtcctgacggacggcttcgcgcaggcggttttctaccgcacgctggtggcgaaccggggtcatatcgatgaagtcgataacgatcaggccgccaaggtcgcgcagacgcagctgacgagcgatttcatcggctgcttcaaggttggtattaaacgccgtttcttcgatgtcgccgccgcgggtggcgcgtgcggagttgatatcgatagcggtcagcgcttcggtgctgtcgataacgatagaaccgccggaaggcagacgcacttcacgctggaaagcggactcaatctgcgattcgatttgatagtggctgaacagcgggatttccccggtgtacagtttgattttgctgctgaaatccggacgacccagcgccgcaatgtgctggcgagccagctcaagcaccttcgggttgtcgataaggatttcgccgatatcctgacgcagatagtcgcggaaagcgcgcacgatgacgttgctttcctgatggatcaggaacggagcagggcggctgtctgcggctttctggatggcttcccagtgcttcaggcggaagcttaagtcccactgcagcgcttcggcggatttgccgacgccagcggtgcgaacgataagtcccatgccgtccggcagctcaaggctggccagcgcttctttgagttcggtgcgatcgtcaccctcgatgcggcgtgaaataccgccagcgcgtgggttattcggcatcagcaccagatagctacccgccaggctgataaaggtggtcagcgcggcgcctttattgccacgctcttctttatcgatctggacaatcacttcctggccttcacgcagcacgtccttgatgtttggacgaccgtgagaattgtagttggcagggaagtattcgcgggcaatttctttgagagggaggaaaccatgacgctcggcaccataatcaacaaatgcggcttcgaggctaggttcaatacgagtgattttgcctttgtagatgttcgcttttttctgttcgtgcccggggctttcgatatccaggtcgtacaggcgctgcccatcaacaagggcgacgcgcaactcttcctgctgagttgcgttgattaacattcttttcatcgtaacttactcattattcttacattgacgactaagctacgggcagagtaacgccttaccggggaaaaccgatggcctcgtgtctgtttcacgtcgccaacctcacggctgtcgcgcgcttaagaggcgcagagtgtcggtcgcctgtatttcaaacggaaacacagcgcacttatcaggggaactgcctgggatgtatcaccagagaagattccatttatacccatcgtttttcatgcagcaggcgtggcggcttaacctgctcatcttaatcatttgatccagatgagcgccgggatatcccagtgtgaacgccttcctgcgacgtgaaatccatagagcctgtaccggtaaggactgcaacccgcagcccgctaactgtctgaaagatcaatacgtcttacgccattgctgcgttgatgatcggtcagacaaaattggtcattccgctaatttcttgttctaacaagtttcagcacggaatactgcatcattattccattgctaagctcgttatagcaagttgactttcaccttttatcacccggttactcacagttttttcacccgcgtatacagattgttctaataacaaacaaaacgatgatgaagcgtactgtgaaatccggatgatgataaatataagcatataaaaatgagtggcgctaatgcgtcgggctatttagaatcgcgcaccatgaaaactgagatcccaagcgtaaaaatggttgccattgctgatgatgaagccgggcaacgtatcgacaactttttgcgtacgcagctgaagggcgtaccgaagagcatgatttatcgcatcttgcgtaaaggcgaggtgcgggttaacaaaaagcgcgtgaagccggaatataagctggaagccggcgacgaagtgcgcatcccgccggttcgcgtctctgagaaagaagaagaggcggtctctccacacctgcaaaaagtagccgcgctggccgatgtgattttatatgaagacgatcatatcctggtgcttaacaagccttccggaacggcggtacacggcggcagcggattgagctttggcgtaattgaaggtctgcgcgcgctgcgtccggaagcgcgtttcctggagctggtgcatcgcctggatcgcgacacctccggcgtgctgctggtcgccaaaaagcgctccgcgctgcgttccctgcacgagcagctgcgcgacaaaggaatgcagaaggattacctggcgctggtgcgcgggcagtggcagtcgcatactaaagtggtgcaggcgccgctgctgaaaaatattctgcagagcggtgagcgcattgtgcgggttaaccaggaggggaaaccgtcggagacgcgctttaaagttgaagagcgttatacccatgcgacgctggtgcgctgcagcccggtgaccggtcgtacgcatcaaatccgcgtgcatacgcaatacgccggccaccctattgcttttgacgaccgctacggcgaccgtgaatttgataagcagctggcgggcaccggccttaaccggctgtttctgcatgcggcggcgctgaagtttacccatccgggtagcggggagattatgcgcattgaagcccccttagataatcagcttaagcgctgcctgcaggtcttgcgtaacgcgaaatgaccgcgctcaggctcagggtttgagccacctggcaagccaggggaaaacttcatcctgctgttgttgattaaaaacgtggcccagttccggccacgtttttgtttccagcttatcctgcgcgttttgcgacgcccacactttatgtacttttgcgaaggcgtcgttaacggcttccgccgggaagagcttatcttgtccgccgctgtaaataagcatcggttttggcgcggcaatgctggcgatatcgggaatatcgaggcgtccggataagccagggtgaagcatataaaacgccgactggccgcgcaaaacgttgttgccaggctgcatcaggccgttccaggttccaaaccaggagataaccgcagtcgcggcgactttgtcagacagggcggccagctgccaggcgcgaaaaccgcccattgagaaacccacgactccaatgcgttgactatcaaccgtttttaaagtgctgaggaaatcgacggtacgcagatcttcataggcaacttcacctgccagcgagcgccccaggttaaagtagttgctggcgagggcctgctgctgctcgtagaccatcggccctcggtccccccaacccgggctatcaatggcgatgacgacatagccgcgctgcgccagttcatcgccgataaaccgaccgctgaaaaatttatccgcccacgcctcggcgctggccagccgtgcggcgtcgttccacggacggattagcttctccttaccgatatcaaactttgagccatggtcgtgcagcagaacaattgccgggtgagggccgggggaatttggcgtcaacatcagcgcggcaatcctgttatcgtcggttacgttgaaggccagcttctcggcggtatacgcgcctcgattttctctcatcagcgtttgcggcgcgaaggggagtgtcgacgccggggttagcagagactgccgaagcagcgtacgggcctgctgtcgccattgctcaaaatcacggtagtggccagagagccacgagtccgggtaggtcatctgcgctttcagctgctgccaggaggcggggagattgccctctacgatgccctggcgctgccagtcatgggcattaacgccggcggcggccagcagggtgagggtcaaaagcgtagcgcgggttggcatagtggctccatttaaaaataaaacaacgtttcataatggattctaatggcgcgggtaaaataaactgtgacaggcgatgcattaattaagttggggtaaacctgctctgctccgttgggcagcgggtaaaacgcgttgtaaagcggcggcacgcggcctcaggaagagaccgcgtgggatcgggaggcctttatcatgtttacgtgagcaggggattcaacgcttcccggcgcagcatctggcacagggcaatgagcggcaaaccgaccagcgcgttgggatctcgcccctcaagccgttcgaatagcgtgatgcctaaaccttcgcttttaaagcttccggcgcactgcagcgggttttccttgcggatatagctctcaatttcctggtcgcttaaacggcggaaatgaacgtcgaaaggttcgcattccgtttgtagatgaccgttggcggaattgtacagcgccaggccggtatagaacgtgacgatggtgccgctggcctttctcagctggcgatgggcgttttcttccgtatgcggtttgccggtaatttcaccgtccaggacacaaacctgatcggagcctataatgaggtgctttgggtagcgtgcggcaagggcctgcgcctttgcctgcgccagacgcatcaccagctggcgggcaggttcgccgggcagcggggtttcatcaacgttcggcgcagcgcattcaaaaggcaccgacagtttttccagcagcattcgccgccacggcgaggttgacgcgaggattagttcagacatattttttcatccacatatagcgcttcgcagagcatcattttaaactatgcgccgcaatgtgtgcgaataaatggcaaaaggcaacctgaggctgcctttttctttgactctatgacgttacaaagttaatatgcgcgccctatgcaaaaggtaaaattacccctgactctcgatccggttcgcacggctcaaaaacgcttagattaccaaggtatctatacccgtgatcaggctgtgcgtgtcgctgattctgttgtcagcgtggacagcgatgtggaatgcagcatgtcgttcgctatcgataaccagcgtcttgccgttttaagcggcgatgcgacagtgtcggtaaccctcgaatgtcagcgttgcgggaaaccgttcccccatcatgttcacacaacgtattgtttcagccccgtcagaaatgacgaacaggccgaagcactgccggaagcgtatgagccgattgaggttaacgaattcggtgaaatcgatctgctggcgctggttgaagatgaaatcatcctcgccttgcccgtagttccggtgcatgattctgaacactgtgaagtgtccgacgcggacatggtctttggtgaactgcctgaagaggcacaaaaaccaaatccatttgccgtattagccagcttaaagcataagtaattgaggagtaaggtccatggccgtacaacagaataaaccaacccgttccaaacgtggcatgcgtcgttcccatgacgcgctgaccgcagtcaccagcctgtctgtagacaaagcttctggtgaaaaacacctgcgtcaccacatcactgccgacggtttctaccgcggtcgcaaggttatcgctaagtaatcacgcattactccatggatttcgcgttgcaagaagacgcaagcgagagaagcaccaggagcatagctcactatgtgactggtgtgaacgagcgcagtcaatgcacttgccgcgtgaaagacgaagagtaaaagcgtgatgaagcttagtgaggatctccccgggtaactggggaataaccgaaccgagcagcgacgataccttgactcgtctaaccctggcgttagatgtcatgggcggggattttggcccttccgtgacagtgcctgcagcattgcaggcactgaactctaattcacaactcacacttcttttagtcggcgatcccgacactatcgcgccattacttgccaaagctgattttgaacaacgttcacgtctgcaggttatccctgcgcagtcagttattgccagtgatgctcgacccgcgcaagcgattcgcgccagtcgcggtagctcaatgcgcattgcgcttgagttagtgaaagaagggcgggcggaggcctgcgtcagtgcgggtaataccggagcgctgatggggctggcgaagctgctgcttaagcccattgaggggatcgagcgccctgcgctggttactatgttgccgcatcagctgaagggcaaaacggtggtgctggatttaggcgctaacgtggattgcgttagcacaatgctggtgcagtttgccatcatgggggcggttcttgccgaagaagcgatcggtattaaggatccccgcgttgcgcttctgaatatcggcgaagaagagatgaaaggtctcagcagcattcgcgacgcggcggcggttttgaagactctgccgaccctcaactatattgggtatctggaagccaacgaattgttgacgggcaagacggatgttttggtttgtgatggattcacgggcaacgtcacattaaaaacgatggaaggtgttgtcagaatgttcctttcactgttgaaatcacagggagaggggaaaaaaaggtcgtggtggctgcttttattaaagcgttggttacaaaaaagcctgtcgaggcgattcagtcacctcaaccccgaccagtataatggtgcctgtctgttaggattacgcggttccgtgattaaaagtcatggggctgccaatcagcgcgctttttgcgtcgcgatagagcaggcagtgcaggctgtgcagcggcaggttcctcagcgaattgccgctcgcctggaatctttataccctgcaggtttcgaattgcctgaaggcggcagaagcggaaattcccggcctcaaacccggatgaccggcaacgactgacgcctcgcagtttgagttaacccggtatattacccaagagtgactgagcgtacatgtatacgaagattattggtaccggcagctatctgcctgagcacgtgcgtacgaacgctgaactggaaaatatggtcgatacgtctgacgagtggattgttactcgtaccggtatccgcgagcgtcgtattgccgcaccgaatgaaacagttgctacgatgggccttgaagccgctaagaatgcgctggacatggcgggcgtcaagccggagcaaattggtctgattattgttgcgaccacctccggtacccatgcgtttcctagctcggcatgccagattcaatcaatgttgggtattaaaggctgcccggcgtttgacgtcgctgcggcctgcgcggggttcacctacgcgcttagcgttgccgatcaatacgtaaaaaacggtgcggtggattacgcgctggtgatcggcgctgacgtgctggcgcgcacctgcgatcctgccgatcgcggaaccattattatttttggcgatggcgccggtgccgtggtgctgggtgcttctgaagagccgggcatcatctccacccatctgcacgcggatggcagctacggctcgctgctgacgctgccgaacgccgatcgcgtcgaaccggaaaaccccatctatctgacgatggcgggtaatgaagtctttaaggtggcggtaaccgagctggcgcacatcgtggacgagactttagctgcgaacaacctcgagcgctctgcgcttgactggctggtgccgcatcaggccaacctgcgtattatcagcgccacggcgaagaagctgggcatgtcgatggacaacgtggtcgtcacgctcgacagacacggcaatacgtcggcggcatctgttccctgtgcgctggatgaagccgttcgcgatggccgcattcaacgtggtcagcttattctgctggaagccttcggtggtggtttcacctggggttccgcgctggttcgtttttaggataaggatttaaacatggcgcaatttgcttttgtgttcccgggacagggctctcagagtgtcgggatgctgtcagatatggcggccgcttacccggtcattgaagagacgttccgtgaagcctctgcggcgttgggttacgatctgtgggcgcttgcacagcagggcccggcggaagagttgaacaaaacctggcagacgcagccggctctgctgaccgcctccgtagcgctgtatcgcgtctggcagcagcagggcggtaaagcgcccgctttgctggcgggccacagcctcggcgaatactctgcgctggtatgcgcaggcgttatcgattttgctgatgccgtccgcctggttgagatgcgcggcaggtttatgcaggaagcggtaccggaaggtaccggtgcgatgtccgcgatcatcgggcttgacgacgctgcgattgccaaagcctgcgaagaatctgctgaagggcaggtggtttctccggtaaactttaactcgccaggacaggtcgttattgccggtaataaagaggccgtagaacgcgcaggggcggcctgtaaggctgcaggcgctaaacgtgctctgccgctgccggtcagcgtcccatcccactgcgcgctgatgaagcccgcagcggagaaactggccgttgagctgcaaaaaataaccttcaacgcgccagctattccagtcgtgaataacgttgacgtgaaaagtgaaacgacgcctgaagctattcgcgatgcccttgtccgtcagctgtatagcccggttcagtggaccaaaaccgttgaatttatggcatcacagggcgtagagcatctgtatgaagttggcccgggtaaagtcctcaccggtctgactaaacgtattgttgacaccctgaccgcttccgcgcttaacgagccggcagctatgtctgcggcgcttgagcaataaaagaggaaaaccatgagttttgaaggaaaaatcgcgctggttaccggtgcaagtcgcgggattggccgcgcaatcgctgagacgctcgttgcccgtggggcaaaagttatcggtactgcgaccagcgaaagcggcgcgcaggcgattagcgattatttaggtgctaacgggaaaggcatgctgctgaatgtgaccgatcctgcatctatcgaatctgttctgggaaatattcgcgcagaatttggtgaagttgatatcctggtgaacaatgccgggattactcgtgataacctgttaatgcgcatgaaagatgacgagtggaacgatattatcgaaaccaacctgtcatctgttttccgtctgtcaaaagcggtaatgcgcgctatgatgaaaaagcgtcatggacgtattatcactatcggttctgtggttggtaccatgggaaatgcgggtcaggccaactacgctgcggcgaaagcgggtctgattggcttcagtaaatcactggctcgcgaagttgcgtcccgcggtattactgtaaacgttgttgctccgggctttattgaaacggacatgacgcgtgcgctgaccgatgagcagcgtgcgggtacgctggcggcagttcctgcggggcgccttggctccccaaatgaaatcgccagcgcggtggcatttttagcctctgacgaagcgagttacatcactggtgaaactctgcacgtcaacggcggaatgtacatggtctgaccgagatttgcgcaaaacgttcaggaaccgcgcagtccgtgcggttctctgtaatgttttgtacaaaatcatttgcgttatgagggcaaacagccgcaaaatagcgtaaaatcgtggtaagacctgccgggatttagttgcaaatttttcaacattttatacactacgaaaaccatcgcgaaagcgagttttgataggaaatttaagagtatgagcactatcgaagaacgcgttaagaaaattatcggcgaacagctgggcgttaagcaggaagaagttaccaacaatgcttccttcgttgaagacctgggcgctgattctcttgacaccgttgagctggtaatggctctggaagaagagtttgatactgagattccggacgaagaagctgagaaaatcactactgttcaggctgccattgattacatcaacggccaccaggcgtaagtgaacatctccaggcggtcactcgaccgcctgagttttatccatattttgtcccacaagaatctattttccctccctggaggacaaccgtgtctaagcgtcgtgtagttgtgaccggactgggcatgttgtctcctgtcggcaataccgtagagtctacctggaaagctctccttgccggtcagagtggcatcagcctgatcgaccatttcgatactagcgcctatgcaacgaaatttgctggcttagtaaaggattttaactgtgatgacttcatctcgcgtaaagaacagcgcaagatggacgccttcattcaatatggaattgtcgctggcattcaggccatgcaggattctggccttgaagtgacggaagagaatgctacccgcatcggtgccgctattggttccggtattggcggacttggccttatcgaagaaaaccacagttcgctggtaaaaggcggaccgcgtaagatcagcccgttctttgttccttccacaatcgttaacatggtggccgggcatctgaccatcatgtttggtctgcgtggaccaagcatttccatcgcgaccgcttgcacctctggcgtccacaatattggtcacgcagcgcgcgttatcgcttatggcgatgctgacgcaatggttgccggtggcgcagaaaaagccagtactcctctgggcgtaggcggctttggtgcagcacgagcgctctccacgcgcaatgacaacccgcaggcggcaagccgtccatgggataaagagcgtgatggtttcgtactgggcgacggcgcaggcatggtcgtgctggaagagtacgaacacgcgaaaaaacgcggcgcgaaaatctatgcggaaatcgtcggttttggtatgagcagcgatgcctaccatatgacttcaccgccggaagatggcgctggcgcagcgctggcgatggttaacgctattcgcgacgcgggcattgaagcaagccagattggctacgtcaacgcccacggcacctctacgccggcaggcgataaagcagaagcgcaggcggtgaaatccgtcttcggtgacgctgccagccgcgtcatggtcagctcgactaagtcaatgaccggccacctgctgggcgccgcgggcgcagtagagtctatctactccatcctcgcgctgcgcgatcgggcggttccgccaaccatcaacctggataacccggatgacggttgcgatctggacttcgttccgcacgaagcgcgtcaggttagcgatctggagtataccctgtgtaactccttcggcttcggcggcactaacggctcgctaatctttaaaagggtgtgatgcgcgcctgacgccacgcctttgctgacgtcaatgctcatcgaaaaactggcccgctcgtcgggcctttttttattcagttttctccgcttgttcaatgtatctcctcctgcgaaactaaccggccagcgataaggagacttttatgtatttgataaatggcgctgaaagtgaaacgcttgcggtgaacgatcgcagcgttcagttcggcgatggctgctttaccacggcgcgcatcgtcagaggccgggttcagctgctgtcagcccatctggcccgcctgcagaaggcctgtgaacagctctttatcccctacgacgactgggcgctattagcgcaggagatggcgcatctggcgcagccccatcaggatggcgtgctgaaggtcatcatcacgcgcggggcgggggggcgcggatacagcgctgccggctgcgtgaatcccgtgagaatcctcagcgtatcgccctggccggagcactatcttcgctggcgcgaggaggggatctccgtgacgttgagccccgtcaggctgggacgcaatccctcgctcgccggcctcaaacaccttaatcggctggagcaggtgctgattcgttctcatcttgagcagacggacgccgatgaagcgctggtccttgacagcgacgggtggcttacggaatgctgtgccgcgaacttattctggcgtaaaggatccgacgtctttaccccgcgcctcgatcgggcgggggtcaacggtattatgcgccagtacattctcgctaagctggcaccatcgccgtttcgcgttgtcgaagccaccatgcgccccgaggcgttacgcgaagccgacgaggtccttgtctgtaacgcattaatgccgctggtgcctgttcgccgctggaacgataaacgttggtccacgcgcgagctttatcattttttagcccccttgtgtgagctgtctgattagccatgaagaaaatgttacgtttcattctgctgttggtggtggtgctgggcatcgccgcaggcatcggtatgtggaaagttcgccagctggcggacagtaagttactgattaaagaagagaccatctttacccttgaggccggaacggggcgcctggcgcttgggcaacagctgtatagcgataaagtcattaaccgccctcgggtgttccagtggctgctgcgcatcaagcctgagctgtcccactttaaagccgggacctatcgctttacgcctgatatgacggtacgccagatgctgcagctgctggccagcggtaaagaggcgcagtttccgctgcgcttcgttgaaggtatgcgggtgagtgactacctgcgtcagctgcgcgatgcgccttacgtcaagcatacgctggcggatgatagctatgaaactgtggcgaaggcccttgaactggaacatcccgattgggtcgaaggctggttctggccggatacctggatgtataccgccaataccagcgatgtggcgatccttaagcgcgcgcatcagaagatggttgccgcggtcgataaagcctgggaagggcggatggagaatctgccgtatcatgataagaatcagctgctgacgatggcctctatcattgaaaaagagacggcgctgccggaagagcgcgaccgcgtcgcatcggtatttattaatcgtttacgtatcggcatgcgtctgcaaaccgatcccaccgtgatttacgggatgggggagagttataatggcaaattgacgcgtaaagacctggaaacgccgaccgcttacaatacctatgccattaacggtatgccgcccggacccatcgccgcaccgggcgaggcctcgctgaacgccgccgcgcatccggcgaaaacgccgtatctttattttgtcgcggacggcaagggcgggcatacgtttaacaccaacctggccagccataaccgctcggttcaggattatttgaaagtacttaaggaaaaaaatgcgcagtaactatatcgtcatcgagggcctggagggcgcagggaaaaccaccgcgcgtgaatgtgtggtagagacgctaaaacagctgggcgttagcgatatggtgtttacccgcgaaccgggcggcaccattctggccgagaagctgcgcagcctggtgctggatattcagtccaccggcgatgaagtgattaatgataaagcggaagtgctgatgttttacgcggcgcgcgtacagctggtagagacggtgattaaacccgctctggcgcgcggtcaatgggtcattggcgatcgtcacgatctctctacccaggcctatcagggcggcggtcgcggtatcgaccagacgatgctggcgaccctgcgtgacgcggtactgggagactttcgtccccatctgacgctttatcttgatgtgactccggaggtgggcctgaagcgcgcccgcgcccgcggcgaacttgaccgaattgagcaggagtcgctggatttctttaatcgaactcgcgcgcgctaccttgaactggcggcgcaggatcccaccatccgtaccgttgacgccacccagccgctggaggccgtcgagcgcgacatccgtgcggtggtcaatcagtgggttgcggagcaactcccatgaaatggtatccgtggttacgcccgccctttgaacagctggttgccagctatcaggcgggacggggccaccatgcgctgatggtccaggcgctgccgggcatggggagcgatgcgctgatttacgcgctttgtcgctttctgatgtgccgccagccggaagggcataaaagctgcggtcattgccacagctgtcagctgatgcaggccggtacccatcctgattattatgcgttgaccccggaaaaggggaagagctcgctcgggatcgatgccgtgcgcgaggtgagcgaaaagctttatgagcacgcccggcttggcggcgcgaaggtggtgtggataggcgatgccgctatgctgacggatgcggcggcaaacgcgctgctgaaaacgctggaggagccgccggagaatacctggttcttcctggcctgtcaggagccagcgcgcctgctggcaacgctgcgcagccgctgtcgtttgtatcaccttgctccgccttcagaacgctacgcgctggcgtggttagagcgggaagtgacgatgtcacaagacgcgctgctcgcggcgctgcggctgagcgccaacgcgccagcggcagcgctggatctgctgcaggattctcactgggcaccgcgccagcagctttgtcagatcctgggtaatattttaactcacggcgactggctgacgctgttgccgattttgaaccatgaacaggcagcgattcgcctgcactggctggcatcgctgctggtcgatgcgcaaaaaaggcagcaggggattacgcttatcagcaatccggacgcctggccactggtcaatcagctggccgctgcgctgccggcggcgcgcctgcaggcgattgcgcgtgacgtcagcgcctgccgcgaacagctgttgagcgttgtcggcattaatcgcgaactgctgctaaccgagcgccttctgcgctgggaacattacctgcaacccggggcggttcttcccgtatcccacctctgagagagacatcatgtttttagtcgactcccattgccatctcgatggcctggattatcaaacgctgcataaagatgtggacgatgtactggcaaaggcttccgcgcgcgatgtgaaattttgcctggcggtggcgacgacgctgccgggataccgcggtatgcgcgagctggtggggcagcgtcacgacgtcgttttttcctgcggcgtccatccgttaaaccaggatgaagagtatgacgttgaagagctgcgcaaactcgcagcagaggacggcgtcgtcgcgatgggcgagaccgggctcgattatttctacacgccggaaacaaaagcgcgtcagcaggcgtcgtttcgcgatcatatccgtataggccgggagctgaataagccggttattgttcacacccgcgatgcccgcgccgatacgctggaaattttacgcgaagaaaaagtgacggattgcggtggcgtactacactgtttcactgaggatagggagacagcgggtaagctgctggatatggggttctatatctcgttttccggcattgtgacgttccgtaatgcggagcagcttcgcgatgctgcgcgctatgtacctctcgatcgcctgctggtggagaccgattcgccgtatctggcgccggtaccgcatcgcggcaaagagaaccagccggcaatggtccgggacgtcgccgagtatatggcggtcctcaagggcgtatcgctggagcagctggcacaacagacgactgaaaatttcgcgacgctttttcatattgacccctcccggctgcaacctctctgatattgcttattattttaaggctcgtaattaatagctaaagcgagtaaagttcaccgccacaaatggggcggtgaaggttttttggcaacattcagacacgacttatgtaaatcaatgtcagtttttaatgggtgtctgattgaaacgtgatagccgtcaaacaatcatcccggtaattattttactctgtgtaataaataaagggcgcttagatgtcctgtccacggcgcggttctccccccgggccaatgcgtgaaaacgtaaaaaagcaccaaatactcaggagcactctcaattatgtttaagaatgcatttgctaacctgcagaaggtcggtaaatcgctgatgctgccggtatccgtactgcctatcgcaggtatcctgctgggcgtcggttccgcaaacttcagctggctgccagccgtagtttcccacgtcatggcggaagcgggcggttcggtcttcgctaacatgccgctgatttttgctatcggtgtcgcacttggcttcaccaataacgacggcgtatccgctctggcatcggtcgtcgcttacggcatcatggtgaaaaccatggccgtggttgcacctctggttctgcatttacctgctgaagagattgcggctaaacacctggcggataccggcgtcctcggcggtatcatctccggtgctatcgcagcctacatgttcaaccgcttctatcgcattaagctgcctgagtatctgggcttctttgcgggcaagcgttttgtgccaattatctccggcctggcagcgatcttcactggcgtgatcctgtcctttatctggccgccgatcggtaccgcaatccagactttctcccagtgggccgcttaccagaacccggttgttgcgttcggtatctacggcttcattgagcgctgcctggtgccgtttggtctgcaccacatctggaacgttcctttccagatgcagattggtgaatacaccaacgcagcaggtcaggtcttccacggtgatattccgcgctatatggcaggcgacccgactgcgggcaaactgtccggcggcttcctgttcaaaatgtacggtctgccggccgccgctatcgctatctggcactctgctaaaccagaaaaccgcgcgaaagtgggcggtatcatgatctccgcagcgctgacctcgttcctgaccggtattaccgagccgatcgagttctcgttcatgttcgttgcgccgatcctgtacatcatccacgcgattctggcaggtctggccttcccgatctgtatcctgctgggtatgcgtgacggtacgtcgttctctcacggcctgatcgacttcatcgttctgtctggcaacagcagcaagctgtggctgttcccgatcgtcggtatctgctacgcgattgtttactacgtggtgttccgcgtgctgatcaaagcgctggatctgaaaaccccgggtcgtgaagacgccaccgaagacagcaaagctggcgcgaccagcgaaatggctccggctctgattgccgcgttcggcggtaaagagaacattactaacctcgacgcatgtatcactcgtctgcgcgtgagcgtggcggatgtggcgaaagttgatcaggctggcctgaaaaaactgggtgccgcaggcgtggttgttgcaggttcaggcgttcaggctattttcggtaccaaatccgataacctgaaaactgaaatggatgaatacatccgcaacagctaagttgtgatatggggagactaaggcagcctacgggctgccttttttaatggccgcaggcgttaaaagcgcgcccgcggctttcgtcacgttaagcagagatcagaactgatagctggccgtaatgctgacgttgcgcggttcgccgtagacgatggaaccatcgatgttggtgtcgtaggttttgtcgaacaggttattgacgttaccctgcacagcaaaatttttagtgacctggtagcgagtgaacacatccaccagcgcgtagctgccttgttccgcacggaacgtcccgtacggcgtcgcggtatctttatacacccggttctgccagttaacgccgccgccgacggtcagttcaggcattaccggcagacggtagcgggtgaacagcttgacgctggtacgcggcaggttgggattcaccgcattgccttcattgtcttcagcgacaaaacgcgtcgccccaaaggtcatctgccagttatcggtaatcgccccgttgatttcgaactccacccctttgcttacggtaccgtcgacggttttataggctgcttctccgttactgccggggatttgcccgccggtcgcctggccgaggttatcctgctcgatgcggaatagggcgagcgtcgtcgttaaccggctgtccatccagtccgacttcaggcccacttcatagttgtttccggtaaccggggtcaggtatttaccggaactatcgcgcttattctgcggctggaagaccgaggtatagctggtgtaggccgaccagctgtcgttgatgtcgtaaaccagcccggcgtacggggtggtatggtttttctccatcgtgtaggtcagcgtctcgatgctccagttgttatagcggacgccaagaatcagatgcagcgggtcaagcagggaaaaacgcgtcgccgcgtacagcgacttcattcgcgtggtatcgtcctgcgccaggctctgcgggccccagctggtttccgggaatgtcgcgctattgaagccatagaagttgccaacttcatcggggaagacgtttgcccacgaactgaaatagcggttgttttgtttactgtagctggtgccgatcatcaggttgtgctggcgaccaaacaggtcgtagccgccgtcggcgaacaggtcaacggcgtcgactttacgtttgccgctattccagccggtaccgccgacgtaatcatagcccgggccgtagctgttataggggcccaccagcattccggtcgctttgttgacgtacgcgtccacgtacatcatcttgctgtcgaacgtgatctcagaatgggtggcattcagcgttgcctgccaggtatcggcaaagcgctgtttcagcgtgacgaagaccttgttgatctctttgtcgttataggcccagtcgggcgcggtgctgtgggcgcggtcatagtggttcttgctgccatcggtattccagcgaggcaggccaccccatgtcgggctattcacgtcgatacgctgatactcgtagccagcggataaagcggacgacgtaccgagatcggcatcaagaatgccggagaagaacgttttttcgctgttatagcgatccagccacgagtcattattttgataaccggcgataatgcgcgcccgtacgctgccatcgtcagtcagcgggctttgcatatcagcaacgtagcgctgcttattccagctgccgtactccgcagagacatttcccttgaactcccgactggtcgcgtgcttgcggatcatattgaccgacgcggcagggttgccggtaccggtcagcaagccgttggcgccgcgtacgacctcaacccgttcgaagagggccatatcggaaagcgcgtcgcccagattccagcgagattcaaaccaggtcggaatgccatcgaccatataattgtcgatctcaaaaccgcgggaataatagctggtgcggtctgagtccgcctggctgctgctgatccccatggtatggtccatgacgtcgcccagcgtttgcagctgctgatcccgcatccgctgttcggtaatgatactgaccgattgcgggatatcgcgctgggccatctccattttagtcccggctgaggtggttctgacgctgtagtcctgctcttgtgtctccgaggcgctatctgcggaaccttctacaataatagtgtcttcggacgtgccggctgcctgactgaggttgggaaagatcgccagcgcgatacccatagcaagcagggacggcgcgttacgcccatcccgaaagttggtggagagagacatcataaacccttgatcgtatgattgttgttatttgctgcggcgcgatagccgcggtagatcgtcagtgcactgcattttctttgaatacaaatgagaaatatacgcattaatatttaatatgtaaacaagtgggaaaacggctgtacccgggtcttgttgaccggtaccggggggcatacagcgaagaaacgcttaatccgtcagcagctaagcgcttgctcgcgtaagaaaaaacgcattcaggttgaaagagggggagtaactcgctcatactcttaggggaatcctgtgcatccgcgtttacctgcagaggcaggccagagcacggtataaaaattattaaggaatcagtcatggcagaagaaacgattttcagcaaaatcattcgccgggagatcccgtcggatgtggtttatcaggatgagctcgtgaccgcttttcgcgacatatctccgcaggcgccaacccatattctgatcgttcccaatatcctgattcccaccgtcaacgatgtgaccgcagagcacgagcttgccctgggacgcatgatgaccgtcgcggcgaaaatcgcccgcgatgaggggcttgccgacgatggctatcgcctgatcgtcaactgcaatcgccacgggggccaggaggtctaccatgtccatatgcacctgttgggcggccgtccgttaggcccgatgctggctcataaaggttaacattcatgcgcgcagctcacttcggcgcacttctggccgtgacgttactggccgggtgcagttcgcatccggaaattccggtcagcgatcagcaaagtctggtgatggaatcaaacgtactggcagcgggcatcagcgctgaagtaccgacggtgaccgcatccgagattcaggcgacggcgaccacccgattgttcaatgaacgccaggtaccggtgaccgtgcattatcgctttttctggtatgacgccagagggctggaaatgcatccgctggagtccgcgcgcagcataacggtgcctgcgcactcttccgttacgctttatggcagcgccaatattctgggggcgcacaaggcccgactttatctttatctgtaagaggtaatcgtaatgattaaactatgtcgctatgcattagttaccgcactggcgatattccttgccggatgcgtgggtcaacgtcaggaacccgctcccgttgaggaagcgcagccgaagccgcagcagcccgttcagccgcagccgactgtgccgactattcccgtgatacctacgcagccgggtccgatagaacacggcgagcagccagcgcagccggcgccgcgcgtgcgtcattttgactggaattccgcggtgcagccgatgattgggcagatgctgcaggccagcggcgtaaatgcgggcagcattttgctggtcgacagcgtcaataaccgcaccaacggcacgttgaatgcgggagaggccaccacggcgctgcgcaacgcgctggaaggcaatggaaaattcaccctggtctcgcagcagcagctgggcgtagccaaacagcagcttggcctgtcgccgcaggatagccttggcagccgcagtaaagcgatgggcattgcgcgtaccgttggcgcacagtacgtgctctattccaacgcgaccggcaacgttaattcccctgagctgaaaatgcagctaatgctggtccagaccggcgaaattatctggtcaggcaaaggtgctgttcagcaacaataagctcacgcgcgacgaagtgctgtcgcgctttttcccgcgctatacgcctgtcgccgcgccgccccaaaacgggctgagcggcggcagctgcattctcagcgatggtcggcaaaagcgggtgctgcgccagccgcacgatccgcatgcgccggcctgcgactttcgccgtcaatatcacgttctgtcacgccttcccgattcgttagcgcccgcgccggtgttttattctcccgcctggatggtggtggaatattgctcaggcgatgtggttaacgcattaccggagtgtccggcgctcgcagggttactgtatcatctgcaccagcagccgcgctttggctggcgtatcgcgctgcggccgctgcttgagcggtactggcaacagtgcagccccgcgcggcgcacaccgcagtggctacgctggcacaaacggctgctgcgtcgcggcgagccccggccgctgcgtctcgccccgttacatatggatgtccatgcgggcaacatcgttcacggcgaggcgggactgcggctgattgactgggaatatgcgggcgatggcgatgttgcgctggagctggcggcggtgtggatcgagcccgccgcgcatcgtcggctagccgcagaatacgcgaggcaggcgagcatcgatgagcttcagctctggcggcaaattcagcgctggcgtccgtgggtgcagctgctgatggcgggctggtacgagcgacgctggcagcaaaccggcgaccgacagtttattgcgctggcggatgaggtatggcgccagttagacaaaaagtaaaaggataagagaggtggatgtgggcccggtaatgttggatgtcgaaggttttgaactggatgcggaagagcgtgagattctggcgcatcctttggttggcgggctgatcctgtttacccgcaactatcacgatccggcgcagctgcgtgagctggtccgccagatccgcgaggcctcgcgcaaccatctggtggtggcggtagatcaggaaggcgggcgcgtacagcgtttccgcgagggctttacccgccttcccgcggcgcaatctttcgccgcgctgcttggcatggaggagggcggtaagctggccgcagaggccggctggctcatggccagcgaaatgatcgccatggatattgatatcagctttgcgccggttctggacgttgggcatatcagcgccgctattggcgagcgatcctatcacgacgatcccgacaaagccctggcgatagctcgtcattttattgacggcatgcacgccgcgggaatgaaaaccaccggtaagcactttcccggacacggcgcggtgacggccgattcccataaagagacgccgcgcgatccgcgcgcggaagcggaaattcgcgccagagatatggccatcttccgtacgctgattggcgagcagcggcttgatgcgatcatgcccgctcacgtcatctacagcgacgttgacccgcgtccggccagcggatctgcgcactggctaaaaacggttctgcgcggtgagctgggatttgaaggggtgattttctctgacgatctgtcgatggaaggggcggcgattatgggcagctacgccgagcgcggccaggcatcgctggaagcgggttgcgatatgatccttgtctgcaataatcgtaagggtgcggtcagcgtgctggataacctgtcgccgatcaaagcagaacgtgttacgaaattgtatcataaaggttcctttagccgtcaggcgttaagggattccgcccgctggaagacgatcagcgcgcagcttgagcagcttcacgcgcgctggcaagaggcgaaatccgcgtaataaacctgaaaggcgttgttgtctggtgaggatgcgatgattatctatttacatggttttgattcaaacagccccggtaaccatgagaaggtgcttcagcttcagtttattgaccccgatgttcggttgattagctacagcacgcggcatcccaaacatgatatgcagcacttattaaaagaggtcgataagatgctgcagctgagcgccgacgatcggccgctgatttgcggcgtgggtctcggcggcttctgggcggagcgaattggctttctttgcgatatccgccaggccatttttaacccgaacctgtttcccaatgaaaacatggaagggaaaattgatcggccggaagagtatgcggatattgccaccaaatgcgtgaataatttccgcgaaaaaaaccgcgatcgctgcctggtggtgctatctcgtcaggacgaagcgctgaatagccagcgttcggcggacctgctgcaccattactatgagataatttgggatgaagagcagacccacaagttcaagaatatctccccgcatctccagcgcataaaagccttcaaaaccctcggctaaacgcgcgccggcccgcaatgtgaaaacatcgcgggcttttttttattcatttttgcgattctgcgctcaaaaaatatgcggtaaaacttgatgcatatcaattttggtatgaccaatgcaccgttcatgttattctcgatctcgctgaatggtttcactgccgtaacctgttgttaattaaaggttatatctataacttttagttaacaattggttaataattttagggggtcgcgtgactacgccattgaaaaaaatagtgattgtgggtggtggtgccggtgggctggagctggctacccagttgggtaaaaagctgggccgtaataaaaaggccaaaatcacgctggttgatcgtaaccacagccacctgtggaaaccgctgctgcatgaagtggcgaccggttcacttgatgaaggtgtagacgcgctgagctatcttgctcacgcccgtaaccacgacttccagttccagctgggatcggtggtggatattaaccgtgaaaccaaaacgatcaccctcgccgagctgcataacgagaagggcgagctgctggtgcccgagcgtaagctgccttacgacacgctggtcatggcgctgggaagtacgtcgaacgacttcaacacgcctggcgtgaaagagaactgcatcttcctcgataatccgcatcaggcgcgtcgtttccatcaggaaatgctggatctgttcctcaagtattcggcgaacctcggggcgaacggtaaggtgaatatcgccatcgtcggcggcggcgcgaccggcgttgagctgtcggccgagctgcacaatgcggtgaaacagctgcacagctacggctacaaaggtctgactaacgaagctctgaacgtgacgctggttgaagctggcgagcgtattctgcccgcgctgccgccgcgcatttccggcgccgcgcacagcgagctgaccaagcttggcgttcgcgtattgaccaaaaccatggtcaccagcgccgatgcaaacggtctgcacacgaaagaaggcgaatttatcaacgctgacctgatggtctgggcggccgggattaaggcgccggactttatgaaagagattggcggtctggagactaaccgtattaaccagctggtggtcgaaccgacgctgcaaacgacgcgcgatgcggatatttacgccatcggcgactgcgcgtcctgcgcccgcccggaaggcggttttgttccaccgcgcgctcaggctgcgcaccagatggcgacctgcgccctgcacaatattctggcgcagatgaaaggtaagccgctgaaagcttatacctataaagatcacggttcgctggtgtcgctctctaactattccaccgtgggcagcctgatgggcaacctgatgcgcggttcaatgatgatcgaaggtcgcattgcgcgcttcgtctatatctcgctgtatcgcatgcaccagattgcgctgcacggctactttaaaaccggtctgatgatgctggtaggacgtatcaaccgcattattcgtccgcgcctgaagctgcattaatgtctctgggcggcaaagccagaaggttttgtccgcccgtttgcttttcgcattaagagactcatagccagaatatcctcctttccttgccggaaaaccctctcagattcctccgaatcccgttgatttgccacacgttcacgcacttttcatccgctttcttatttgcaagcctgatgcctggattgcaaaattacgggcaatagcaacgaaggaggaagtcccgtgaataaatcaatgttggcgggtataggaattggcgtggctgccgcgctgggcgtcgcagccgttgccggtcttaacgtgttagatcgcggcccgcagtatgcacaggtagtgtccagtacgccgataaaagagagcgtcaaaaccccgcgccaggagtgccggaacgtcaccgtgacccatcgtcgaccggtgcaggatgaaaaccgcatcgccggatccgtgctgggcgcggtagccggcggggttattggccatcagttcggcggcggacgcggccgcgacgttgccaccgtcgtaggcgcgctgggcggcggctatgccggtaaccagattcagggctcaatgcaggaaggggatacctacaccacgacgcagcagcgctgcaaaacggtgtacgataaatcagaaaaaatgctcggctacgatgtcacttacaaaatcggcgaccagcagggcaaaatccgtatggatcgcgaccctggtacgcaaatcccgctggacagcaatggccaactgattctgactaacaaagcgtaaaaaagatgtgtatctttattcgcccctcaggctctctggctgaggggcttttttatcagaagctcaaagcgtagttcaggccgaaggtgcgtccgcgacctttatactcgtagagagagctgctgccgtaggtcgggctatacagcagcggcgcgcgctggccccagacggtgacataatcttcattgagcaggttctcaatgctgaaggtcagcttgccgagggggagcgcgtagctgccgataaagtctaccgtattgtagccgtcgagcttgttgccgctggcatcgctgatatcaaacacctgctggctttgcacccgcagcgaccacggctccggcgcccagcccacccacgcggtggcttttgacggcgaggcgagagtgacgtcccacttctgccagctaccgtcgcttttcacctgcgatttcagcacgttaaagttagctccggcgctccagtcgctgttcgggaagtagtagtccaccgcgccctctacgccataaatacggcgtttatcggactgcacatcgatggtcatatcggtacggttaacgacgatcgttttatcggaggtcgagtagtaagccgccagctgagtgcgcagattatcaccggtgtagcgccagcccagttcgtacgagttaactttaattccctgcagcggcgaatcgccaacgttcacgcttgagataagcggaagatggccgttgaccgccgcgccgtactttccgatgccgtagtatttgcccggatccggcagctcaacgccctgagagaagttaaaccaggtctgctggcgatcggtgagatgggcgacaatcccggcgttaaacaggaagttgtcgtaatcggtttttccgcccggaatggcatccgctgagctgaccttgccgctggcgacatcctgctgctgggcatagccgacaaaatcatcgacccggttttccgtccactgataacgtacgccgccgctgatagtgaagatgtcgttcaggtcatagctggactgcaggaacggcgccaggttggtaatgctgtagccgggataacggccggtggtgtagatagcctggttattcagaccgccggaagacatagactggcccaaatcgaagaacatctgattggcgttgaaggtttcgtggtcggcgtccactccccaggtcagatcccagccatccagcggctggctattcagggtgatcttcgcgccgtactgatcggtatcctgctttgaagaggagaagctgctgacctggcctttgctgagcgtagggaaagggtaaaaagtcagggattcatcacgataatagacctggctgaccagattctggccgaggaaatcggcatcggaatactgcaggcttatcaggtgacgttcggtgccggggacgcggtcggagttcaggccatcggtggtaaaggctttgccgtcgccggtcaccgccgacatatttttcccgaggtacagaccgtaatcgtcgccctggcttttatagtactgggttaccagctgcagctgacggttctcgtcaatctcaatggttcccgttcccatcacatccaggcggtcggaatgctgaagcccggtctgggtattatcaaggatcagcgcatcattattgccatcataccagccgccaaaacgctgataggcgaccgataaacggccggaagcgtggtcggtaccgccgctgaccgctgccgccacgcgttcatcatgatcgttgctgttggcaaaaccggttttgctccccagctccagatcgacctgacgctcctgctggccctttttggtgacgatattaataaggccgccggtactaccgccgccgtacagcgatgtggcgccggagatcacctcgatatgctcaatgttaaacggatcgatagaatccagctggcggctgtcggtacgggaggagttaaggcgaacgccgtcaatcagcacgacgatcgcgcggccgcgcatattcatgccgtagttggtgcgtccctggctgctgacgtcgatgccggggatcagctgcgccagcacgtctttaaattcttttccgccctgaacttgctgttcaatttcctggccttcgataacccaggtggtctgggccatttcagcgacggtgcggtgcgttcggtttgcgctgacgatcatgctgtcatcagcggcccaggcgggcagggcggttgccagcagcagtgggttaagcacccagagacgcttgttcatgctcattccttttatgagtttatgcccctcattcttcaagttgcaggtgtgttgactgcggattactcggcccatccatgggcctcgcccctacggggccagcgctagcgcagatcaaggcacaagcgccatgtcctgcaactcgaattatttagggcttacgatatcgttgttttcgttattcggtacgggcgtaccggttgttacatggtgaaatatacagaaacgtttaacaccgaattttgcccgtattgattattgttatcaatatcattctcgcgaaatgaacaaaataaatgactgaaaacattgcgttatgtagggataaaggggaggggaaccggtggggagcccaccggtaagcgaggtcttagcgctgaagaacctgaggccacagacgcagcgtggtctcggcgatttgcatgattttagtgaagtcggcgccttcgcgggcgctgatcgacatgccttgtaatatgcagttgaggaactgcgccagctgacgtacgtcgccgtctggcggcagctcgccgcgcagctgccgctgctggagaaactgcgttagcgtctgttcctgcatcgcgtgccgggacttaacggtattggcgatatcggtggacgccgccgccagcgctgcggaggtattaatcataaagcagcctgccggcgtttctttgctggtaaagcaagtcgcgacggcggtgaagtagtcgcgtaacgctcgatcgacgcttttctcttcgtcaaagaggagcgcttcgtgcctggcggcaaaacgcgcgatgtagcgatccagcaccgcgcgaaacaacccctctttattcacaaattccgcgtagagcgtaggcgcttttgcgcccgtcgcctccactaaatcggcgagagaggtcgcttcatagccgtgctgccagaagagtgtcatggccttatccagcgccgcttccctgtcgaacactttaggtcggccacggcttttttttgtgcaactttgaacgtcagttgtcatggtgccgctgtacctgtgttggtttgttgaaagggcattataaaaataaaccttacgtgctaccagcgatgttgctctaaaaataaataattcatatatgtatgaattttaagctgtttataaatagttaaacggtcgttataaaaatagtttgacgtgtgatgtggatcacattatcatttccctatcgatcgttaattaaatgcgttcgcccctacaaaaacattcatctgcacaggtataacaatcatgaaaaatgttaaaacactcgctatcgccgctgttcttagctcactctctttcgccagcttcgccgctgtagaagttcagtcaacgccggcgggtcagcataaaatcggtaccgtttccgcctcagccgggaccaacctgggttcgctggaagatcagctggcgcaaaaagcggaagagatgggcgcaacctcttaccgtattacgtccgtaaccggtcctaacacccttcacgggactgcggttatctacaaataattgttgcgctacccctgttatgccactgactacgcgcggatctgacccccttcagcagtccgcataaagtaagaagtacgttgttctctgacgagaggcggtgcccgccccttatatggcgccgcaacccgcagaaaagcaggaccctgtttgattattgccataaaaaaaccgcctcagtgaactgaaggcggttttttttcgtcggcagtttagcgaactagagcggctgctccgttacgcgatggtggcgggtgacgtcaatcggcatgcccgaacgcagcatcatcgcgcgttccattacctcggtgtcggtcaactgtgcctgcttaaacgcctgcatgctgtcggtaagggtaatgggcagcgtctgcgggtcgtcatcaatatgttttgacagcggctgatggacctccaccagacgggtgccgttcggctccacggacaccttgattggcgtattgataatcgtcaccctggtgccaggggtgatttcgttgtacaacgctttgatgtcgtcatcgcgcaggcgaatacagccggagctgacgcgcatgccgatgccgaagtcggcgttggtgccgtgcagcagatacacgccgccgtacgccgccaggcgaatagcgtggtgccccatggggttatccgggccagcgggcatgacggcgggcaggtcaatgcccattgctttatagcgggcgcgaatattggccgtcggcgtccaggtcgggttggcgcgtttgtcggagacggtggtaaccattgtcggcgtgatggtgtcgccgccgagctggccaatgccgataggataaacggtcacttcacttcttcctggcggatagtaatagaggcgaagttcggccaggttaaggactaatccttcgcgcggcgcgtcgggcagcagggtttgcagcggaatcgtcagcacgctaccggctcgtggaacatacggatccaccccggggttagcctggagcagggccagaaaaccgacgttgtactttttggcgatcgcttcgagcgagccgccgttattctcgacgacatgaaactggttttgcccgaccagacggctgcccggaggcggcaggggccaggtattggcgcgagcgggcagcgccagcgcggcggcgatagctatcatccccagccagagaaaaattcgcgtaaagcttttcatcaccctaattccataataagtaagtggttatttttatacgaaaagtccctgagattatggcgaagcgagtgtctggaagttcagagggattgcaaaatgtttgtaaattttgccgaacaagtggggaggggcgggatacgacgcacaggccgtatcccgcctgctatcaggcggcggcgttctcttcgagctggcgcataaactggcgcacccactccatccgcgttttacgctcggcaaggtcctgcgtaaacttgaggcgcgttgggccatccaggcgatagtgctgaggctgcttttgcaacaggccaatcagccacatcggattcacgttattcttctcgttaaactcaatggtgccgcccttttcgttgctctccagcttgcggatccccagcttctgcgcctgctggcgcagtcgggcgatatcgagcaggtttcttgccggatcgggcagcaggccaaagcgatcgataagctcgactttgatctcctccagctcattctcgttcttcgcgctggcaatgcgtttgtagaacgacaggcgcgtattcacatccgggataaagtcatccggcagcagcgacggcatccgtagctcaacttcggtctgctgactggtaagatcctccagcgagggttcgcggcctgctttcagcgcgtcaacggcattttccagcagctccatatagagggagaagccgatggtttccatggaaccgctctgatcctcgcccaacagttcacccgcgccgcgaatttcgaggtcatgcgttgccagagcgaaaccagcgccgagatcttccagcgatgcaatcgcctcaaggcgtttttgcgcatcggtggtcatcgccttcggatgcggggtcagcagccaggcataggcctgatggtgcgaacgaccgacgcgaccgcgtagctggtgcagctgtgcgagaccgaagtgatcggcgcgctcgataataatggtgttcgccgttggaatgtcgatcccggtttcgataatggtggtgcacaccagcacgttaaagcgctggtgatggaaatcgttcatcacccgttcgagttcgcgctcgcgcatctggccgtgaccgatggtaatgcgcgcttccggcaccagctccgccagcctctcggcggctttctggatgttttccacgtcattatagaggtagtaaacctggccgccgcgcagtacctcacgcaggatcgcctcgcggaccaccagcgcgtcatattcgcggacgaaggttttgaccgccagacggcgggcgggcggggtggcgatgatcgacagatcgcgcataccgctcatcgccatattcagcgtacgcggaataggcgtggcggtcagggtcaggatatcgacgtcggcgcgcatcgccttgatgcgctctttatggcgcacgccgaagcggtgctcttcatcaacaatcagcaggccgagatcgcgcagcttaacgtccggctgcagcagtttatgggtgccgataagaatatcgactttcccttccgcgacctgctcgaggatctgcgcctgctctttggcgctacgaaagcgcgagagcatctcgatgcgcaccggccagttggcgaagcgatcgcgaaagttatcgaagtgctgctgggcgagcagggtggtcggcaccagcaccgccacctgcttatggttttcaaccgccagaaacgcggcgcgcatcgccacttccgttttgccgaagccgacatcgccgcacaccagacggtccatcgccagcggctgacacatatcgcttagtacggcgttaatagcctgcgcctgatcgggcgtggtctcgaacgggaagccgtcgcagaacagttgatattgctctttatcatgtttaaacgcgtagcccgctttcgccgcacgctgagcgtagatatccagcagttcggcggccacgtcgcgcactttctcggccgctttctgccgcgcccgcgcccagacgtcgccgcccagtttatgcagcggcgcattctcttccgcgccgcccgcatagcggctaatcagatgcagcgacgacaccggcacgtacagtttggcatcgttggcgtaggtcagcatcaggtattcgccgttgatgccgcccgcttcaagggtggtcattccggcgtagcgcccaactccatgctcaagatgcaccaccggttggccgatatgcagctccgccaggttacgaatcaacgtatcgggattgatggtgcggcgagagtcctgacgacggcgcgcgacgcgctcgcccagcaggtcgctttcgcaaatcagcgccagattacgctggctatcgacgaaaccatgctcggcggcgccgatcatcagatagcggccattacccgtcgcctcttcaagacgcaggatatgctttggcgcgatcttaatacgcgccagcatttcgccaagcgcctctcgacgcccctcgctctcgaccgaaaaaatcaccggcccgctgaaggactcgaggaatcggcgcaggttatccagcggcgctttgttctgcgcctggatcgccagctcgggtaatttctgataaccgagattggtgttggcggctttttccgccagacgctcggttttgagctggacgcgcggccattttttgagctcgctaaacagctcatcgctgcgcagccacagctgttccggcggcaaaagcgggcgcatcgggtcgacgccgcggttttcaaagcgggcgcgggtttcgttctggaagcgttcggcgctggcctccagatcgccggtattaacgatcagcgttttcgccgggaaatagctgaacagcggcggcagcggctcgttaaagaacagcggctgccagtattcgattcccgcgggcagcgtgcctttactgacctgctgataaatatgctcggcgtcgcgtttgacctcaaagcggtcgcgccactggctgcggaatagctcgatagcggcctgatccgtcgggaattcgtgcgccggaagcaggttaatgctggcgacttcctccagcgtacgctggctgtcgacgtcgaacagacgcaggctgtctatctcatcatcaaaaaaatcgagacggtagggctgctcgctgcccataggaaacaggtcaagcaatgcgccacgcgtggcgtactcgccgtgctccatcacctggtcgacgtgacgatagccggcgctatccagctgggagcgcagcgcatcccgcgacaggcgctggccttttttcatcaccagcgcgtggccgtggaggaaattatgcggacagacgcgctgcatcagggtgctgaccgggataattagtacgccgcgttccatggtcgggagctggtacagggtggcgagacgggaagagataatgtcctggtgcggggaaaagctatcgtaggggagggtttcccaatccgccaggcccgccaccatgctatcggtaaactgcctgatttcatcattcagacgcagggcgttttgcatatcgggggcaatcagtaccaccgggccgccgtggcgctcggccatttccgccaccagagtggcgcaggccgcgccggtcagttcgccaatctggcgctgatcgccggctttaaccggcagagagtatcggtattgttcaggcatagacggtatcatgatctcttgggtattcgctctgccgatatggagggcaactcgctgatattcaatagtgagattatccgcgatcgacccggattcgccaacccgtatcgcaaacatcctgtcgtggccaaaaatgtaacgaactccgataagcgtaaagttaaataatgacttacctgtctatcttgttgtttatattgatgttttgctatttttgtcaataaaatctacaggtatcagtcatttacgctgcccataatcgcttatatactcgggcatcggctatcagcaatcagatggattacatgtatcaacctgccgcactctttatcggccttcgctatatgcgtgggcgcgcagccgaccgcttcggtcgtttcgtctcctggctttcgaccatcggcattacgcttggcgtgatggcgctggtgaccgttctttcggtgatgaacggctttgaacgcgagctgcaaaacaacatcctggggctgatgccgcaggccattcttagcgccaagcaggggtctgtaaacccgcaacagctgccggaaagcgcggccagattacagggggtcacccgcgtggcgccgctgaccaccggcgatgttgtactgcaaagcgcccgcagcgtggcggtcggcgtgatgctcggcatcgacccggcgcaaaaagatcccctgacgccctacctggttaacgtcaagcagagcgatctgcaggccggcaagtataacgtcatcctgggcgagcagctggcaggacagctgggcgtcaatcgcggcgatcaaatccgcgtgatggtgccttccgccagccagtttaccccgatggggcggcttcccagccagcgcctgtttaacgtaatcggtacctttgccgccagcagtgaagtcgatggttatcaaatgttgaccaacatcgacgacgcctcgcgcctgatgcgctacccgcagggaaatattaccggctggcggctgtggctgaatcagcctttacaggtggatactctcagccagcagacgctgccggaagggaccaaatggcaggactggcgcgagcgtaaaggcgagctgttccaggccgtgcggatggaaaaaaatatgatgggcctgctgctgagcctgatcgtcgccgtcgccgcttttaacatcattacctctctgggaatgatggtgatggaaaaacagggcgaggtggcgattctccagaccctcggcctgacgccgcggcagatcatgctggtctttatggttcagggggccagcgccgggatcgtcggcgcgctgcttggcgccgggctgggcgcgctgctggccagccagctgaataatttgatgccgattatcggcgcgttcctcgacggcgccgcgctgccggtggccattgagccgctgcaggtcattgtgattgccctggtggcaatggtgctggcattactctctacgttgtatccttcatggcgcgctgccgccactcaacccgctgaggctttacgttatgaataagatcctgctgcaatgcgacaacctgtgcaaacgctatcaggaaggcaccgtgcaaaccgacgtgttgcatgatgtcagcttcagcattgaggagggtgagatgatggcgattgtcggtacctccggttccggcaaaagtacgctgctgcatctgcttggcgggctggatacgccgacctccggcgacgttatcttttccggccagccgatgagccagctctccgccgccgcccgcgccgatctgcgcaaccgcgaactgggctttatctatcagtttcaccacctcttaccggatttcaccgcgctggaaaacgtggcgatgccgctgctgattggtaagcagaaggcggcggatatcgagcggcaggcgaaagcgatgctgcgcgccgtcgggcttgagcaccgcagcgaccaccgtccgtcggagctctccggcggcgagcgtcagcgcgttgcgattgcccgtgcgctggtcaataaaccgcgcctggtgctggcggacgagcccaccggtaaccttgacgcccgcaacgccgacagcatttttcagctgcttggcgagctgaacgtggcgcagcgtaccgccttcctggtggtgacccacgacctgcagctggcaaaacgcatgagccgccagctggagatgcgcgacgggcgcctgacagccgaactctccctgatgggggctgagtaatggcttctccgttatcgttattgattgccctgcgcttcagccgtggacggcggcgcggtgggatggtgtcgctgatttcggttatttcgacgatcggtatcgcgctgggcgtggcggtgttgatcgttggcctgagcgcgatgaacggcttcgaacgcgagctcaacaaccgcattctggcggtggtcccgcacggtgagattgaaccggtgaaccagccgtggaacaactggaacgaggcgctggcgaaggttgagaaggtcaaaggcatcgttgccgcggcgccatatattaacttcaccgggctggtggagagcggcagcaatatgcgcgccatccaggtgaaaggcgttgacccgcagcaggagagccgtctcagttcgctgcccaactttgtgcagaacaatgcgtgggccagctttaaagccggcgaacagcaggtgatcctcggtaaaggcgtcgccgatgccctgcacgttaagcagggggactgggtgtcaattatgatccctaactccgatgccgagcatcagctgctgcagccaaagcgcgtcaggcttcacgtcgccggtattttgcagctcagcggtcagctcgatcatagttttgccatgattcccatgcaggatgcgcagcagtaccttgatatgggcagcagcgtgacggggatcgccatcaaagtgaccgatgtgtttcatgccaacaccctggtacgcgatgcgggccaggtgaccaatagctacgtttatatcaagagctggataggcacctacggctatatgtaccgggacattcagatgatccgcgccattatgtacctggcgatggtgctggtgattggcgtggcctgctttaacatcgtctcgaccctggtgatggcggtgaaagataaaagcggcgatattgcggtgctgcgcacgcttggcgcaaaagacgggctgatccgcgcgattttcgtatggtatggtttacttgccggttcggtagggagcctgattggggtggcgattggcgttatctgcgcctttaagctgaccgcaatcattaacggtattgagaacctgatcgggcataaattcctctccggcgacatctattttattgacttcctgccgtctgaactgcactggctggacgtcgtttacgtgctggtgacggcactgttgctgagtttgctggccagctggtatcccgcccgccgcgccagccgcattgacccggcgagggtgctgagtggccagtaatttatcgtcatggtcggctttgctgaccagtaaagaggaattgctgaaatgtactatggatttgacattggcggcagcaagatagcgctgggcgtatttgataaatcgcggcggctgcagtgggaaaaacgcgtcgccacgccgaaagagagctacgaagcatttttgcaggcggtagaggagctggttgaagaagccgaccagcgcttcggctgccagggctcggtgggcatcggtattccgggcatgccggagacggaagacggcacgctctacgccgccaacgtgcccgccgccagcggcaggcggctgcgggccgatctgagcgaacgtctgggccgcgatgtgcggcttgataacgacgccaactgttttgccctctccgaagcgtgggatgacgagttcacccaatatccgctggtgatggggatgatcctcggcaccggggttggcggggggctggtgctcaacggaaaatcgattaccgggcatcgctatattaccggcgaattcggccatatccgcctgccggtggatgcgctggaggtggtggggcgcgattttccgcttacgcgctgcggctgcggccagctgggctgcattgaaaactacctttccggacgcggcttcgcctggctgtatgaacatttttaccaacacgctttaacctcgcccgagatcgtcgcgctatggcagcagggcgacgcgaaggcgcgcgagcacgtcgagcgctatctcgatttactggcggtatgcctgggcaatattttaacgattgtcgacccggatctgctggtgcttggcggtggattgtctaactttacagcaataaccgaagggctggcgcagcgcctgccgcgacatctgcttcccgttgccggcgtgccgcgcattgagcgcgcgcgccatggcgatgccggaggcatgcgcggtgcggccttccttcatctgactcaataacgacagaggtagctatgcagtcgcgccgcttacatcgattaagccgatttcgccgcaataagcgtcggttacgagaccgtctgcgtcagcggattttcttcggcgaagataaggagacccctgaaacgatggaaaaaccaagagtcgtggtgctaaccggcgcgggtatttcggcagagtcgggaattaaaaccttccgcgccgccgatggcctgtgggaagagcatagggtggaagacgtggcgacgccggaaggcttcgcccgcgatccggcgctggtgcaggcgttttacaatgaccgccgccgccagctgcaaggaccggacatcgtgcccaacgcggcgcatcaggcgctggcgcggctggaagaggcgctgggcgatcgttttctgctggtcacccagaatatcgataatctgcacgagcgcgcgggcaatcgccgggtgattcatatgcacggcgagctgctgaaggtgcgctgctcgtggagcggccaggtgctggcgtggaccggcgatgtgacgacggaggacaaatgccactgctgccagttccccgcgccgctgcgcccgcacgtggtgtggttcggcgagatgccgctggatatggatgagatctaccttgcgctggccgagtgcgatatctttatcgccatcggcacttccgggcacgtttatccggcggcaggctttgttcacgaagcgcggctgcagggcgcccatacggtagagctcaacctcgagccaagccaggtgggcagcgaatttgccgaaaaacactatggcctggcaagcgaagtggtaccgtgctttgtggaaaagctgcttaaacagctggcaggataaacgcaacctcatcactacagcgttacggaaaacaggagtggctatggatagcccattagcaatatctgtcgcgataattttggccgcagtaggggcggttcggcgaggttcggcccgcttatcgtgctgagcgcgttgtggaagccgctgaattatgttgcgggaaagcttgctgctgtcttaacgaaaaccaggacaagaaataatccacgcttttgccaccgcccgagaaaaagcgtacgacaatcgccagggcaggtcgctcatgaaattcaggacgccgcggcgccctttattcatagcgccttctgcatattaatcaccgcccgggcattggatgcgctggtggccagcacgtcaatcacgccggtgcgcagcgcgccgagaatcgccgttgccttggtgctttccgaagcaatggcgatcacgcacgggatggcgcggagctgttcaaggctcaggccgataacccgatcgttcatcaccgtatcaaccggtttaccctggatattgaaaaaactatagccggcgagatcgcccactacgccctgttcctggcgcgcggtcgcaatctcctgtggggagaaccagccgagctgcaccataaagctattttcattcatatcgccaaggccaatgatggcgacatccgccttgctggcctgttcgagcgtggctttaatcagccggttttgcataaacgccgagcgcagttccggcgtttcgacataggccggggcgtacagcgtttcgctaaaaccgttgaatttacgcgccaggtttcgactgatgtgatcggcatcgatcagctggttgtcgcgcttggtgccgccgataccgcaaataaagcgacagttgcgctccggaaaaatccccacgtggttggccacggcggcgacgttgcgaccctgcccgacggtcaccgtcatatcgcttttgaggatcccggcgagatagttgctgaccagcgccgcgacctgctggcgctgttcatcctcgtcgtgatggtccagggcgataagcgcgcgcttgatgccgaaatgggagataaactgctgctcaatctgggagctgaagaccgggtggtatttcacgctgatctcgacaattccttcgtggcgagcttttttcagcagccgaccgaccttaatgcgtgagatcccaaagcgttttgcaatctcttcctgggtttgctcctgatcgtaataggccacggcaatttctgtcagcagcgcataatctgagtcttgttcagtcatagttatcgcctggtgtttccatctttgatgtctccctaatactactgcgcctgaagaataaattcctctgtaacgcgttgaacaatgtcgcaatagccgttggcatcccatgccgcgcggccaataaacagtccgttaatgtcatcctgctgaaggagttctacggcattttgccgattgacgctaccgccgtacagcaggggaacgcgccgtccgatttcttcgctgaaggtctcgcataacgcctgacgcagcgcccggtggatctctgcggcctgctccggcgtcgccggcgtgccgtgttcgccgatagcccatatgggctcataggcaaccagagtgtgtaaaacctgctgttcattcaggccataaagcgcgattttcatctgccgcactaccgtttcccgtgagacctgccagcgtttttcatcggcgctgtcgccgatacagatcagaggccgaaggccatgacgcagggcgcgatgtactttttggttaatggcggcgtcggattcattgaacgcgccgcgacgctcggagtgaccaagctcgaccagggcggcgccggtttcagccagcatggcggcggatatttcaccggtccaggcgccgttttccgcttcatgcatattctgcgcgccggtcaggcaggggatctgatgctgctgtagatactggctgacgggataaatggcggtgaaagggggaataataaacggctggattttcggatgcctcacctgcggtaaccgctgcgccagcgtttcacaaaaggccatggcttgcgataacggtttgttcattttccagctggttcctaaccagatttgttccattttgttctccgtaataggtaaatcaatagcttgtcgtgaaatggctttcgcttatgagtgagattgaactttttatcacccaatgaacatatgttagatcacatttttttataaaataaatctatggatttttttatgtgatctaaatcaccaataacctctcaatcatcaggtaatgttttgaccatatgattcactattgaacatatgaacaaaccgattttcactacgagaggtccacgatgtcacaagagaaaaagcccgttgtcgcacttaccattggcgatcctgccgggattggtccggagatttcagtcgcgacgatgatggagaaaagcgtctacgacgagtgcaaaccttttttgattggctcagcgccgattatcgccagagcaatgaaaatcatgggctgtgattttccgattaacaaaattagccatccgcaggaagctcgcttcagctggggtacgctggacgtgctggaaaccgatgattatgactgcgagagcattgaatggggcaaagtgcagaagctggcggggcagatgtcgctggactatgttctgaaatctatcgaactggggaaagccggcctgatcgatgtggtctctaccgcgccgattcataaagaagcaatcaagctggcggggtgtaaactgccgggtcataccgagatctatcaggttgaaacgcaatccgattatggcctgaccatgttccacgttcataacctgcgggtcttcttcgtgagccgtcatatggcgcttaaagacgcctgcgattacgccaataaagagcgcgttctggcctgcgtgcagcagatccaccatgagttcaccgcgctaaatatcaaaaatccgcgcattgcggtagccgcgctgaatccgcatggttcagacaacggcctgtttggccacgaagaagccgataacctcatcccggcagtcaaagcggcgcaggaaatggggattaacgccatcggcccggtgccggcagattccgtcttccatctgggtaaacaggggcgctatgacgccatcctctcgctttaccacgatcaggggcatatcgcctgtaaaaccctcgattttgagcgttccgtgaccattacctttggcctgccgtttatgcgtagctcggtagaccacggcacggcgtttgatattgccggcaccggtaaagcgggcaccgtcagtatgctggagtccacgatggccgcggtgagctactggaaaatgaaaaaccactaatcgctgaggttaatgcgaagcaaaagggcagagaaatggaaaaacatctgttaattagcaaaggctgtaagggctggggcgggccgctgaccattaatattagccaggcgaaaaagattgcttatatcaccggggggatttgtcccccggttgttgagcgcctgagcgaactgaccggctggccttccgtcgacgtatttaaaaatggcgagccgccggaagaggagatcggcctgatggttatcgactgcggcggcacgctacgctgcggtctctatcccaaacgcggtattccgacgattaacctccatcccaccggtaaaagtggcccgctggcggagtttattcatgaaggaatctacgtctccggcgtgacgcccgcctgtattgaaatgatctggccgcagggggaaggcggtaagctggggatcgtggccgacgatctgaccggtgcgaccaccgtcggggtgctgctggcgcgtagcgggttaaaaaccgccgcgttcttcgatactgaatccttcgcccgcaatgaggtggagtatccggcgatggtcgtcagcagcgacagccgtcctttgccgaaagcggaagcccagcagcaggtcagcgccgcggtgaagcagctgcaggcgcgcggcgcgcactactttaccaagcgtattgataccacgctgcgcggcggtatcggctttgaaattgacgccatgctggaacaattgccgctggaaacggttgccgtcgtcgtgccggcgatgccgcagtcgcggcgtattctggttggcggctattcggtaattgactccgtcgcgctttcgcgaaccgatgtcgcacgcgatgtacgtaccccggttaccgaatcctgggtgccgggattgctggcggcgcagacccatcatcaggtcggacatatcgcgctggcctcggtgatgaaaggcgaggggcaactgcagcgggatctccaggaacagcagcagcgcggcgtgcgggtgatcgtcgttgatgcgattaccgttgacgatgtcgatgcgattgccggggcggtggtggcgctgaactggaacgtgctggcggtcgacccggggccttttaccgagcggcttgcggtccgtcgtggcctgatgcgggaagcgcgcagcagcgcgacagcgtcgtcaggggcggaaaacccgcgcggttcgattctggtggttgccggtagcgccacgccggtgactaaaaagcagcttcagcatctgatcgctaatgacgaaagagtatgtcacattcctgttgatgccgaactgctggttgacaggaaaaacgccgctgaaatcgaagtgaatcgcgtggtgcagcatgcccggcagtgcgtgccggcacagcagaacgccatcttcgtttttgaatccgcgttaaccgggcggctgctgaatcttcaggaagaagagcagcgctttgggctggcccacggacaggctgcggaaaatattaaccagggactggggaatattgttcgtgacgtgcttaactgcgcagccggagaaattaaaggcctgtatatgaccggtggcgatacgatggtgaatgttcttaaagagctcggcgctaccgggattgaaatgattgactacgtgataccgcaaaccgatatggtgcgtattatcggcggcgattatgcgggattgatttgcgtcggtaaaggcggtttaaccggaccagaagatattattagtactattgttgaaagaatttataaagaagcgcagctataacccaccggtcatataaataaaaaacgacgtaatggtcgtccgggtagtattgcgtcgttatctctgttaaatcataatttatgagttaccctatgaacataaatatattagagaagatgaataaggtgccaggcggtttaattattattccgttgctcgcggcgattcttattaatacctttgcgccggaagtcctgggcatcggcggcccgacgaccgcattattcaaggttggttccagcgcaatgatggggatttttctgctaatttgcggtacctcgatcaatatccgccaggccggcttgccgctctataaaggcgcggtgctgctgttcctgaaatgcctcgccggcgcgctggccgtatgggtggccggagcgatgtttggccccaacggtttcctcggtatttcgaccctggcgctgattgcctgcttaaccagctccaacagctcgctatatatcgcgctgtgcagcaactacggcgatgccagcgacgccggggcgatctccgtcttctgcgtcaaggatgggccctttgttaccatgatggtgctgggggtcagcggcctggccaatattcctttcgccgcgctgctatcgatgctgatcccgctgctgattggtatgctatggggcaaccttgatgatcgtttcaaacagctgtgcgccgccgctcagccgctgattatcattattatgtcgtttgccatcggcgccaattccagcattaacacggtctttaccgccggactgtccgggatcctgcttggcattatctctgcgctaaccggcattgtgttctattttatctacaacctgttcctgaagaagaaaaccgcgctgggcgccgcgctggggacaaccgccgccagctctgcgctgacgccggcaatggtggctcaggccgacccctcgctggcgatgtacgtggatgccgcgaccgcgcagctggcgacggcgagcatcatcaccatgattaccgcgccgatactggtggcctggtttgataaacgtctgaaaaagcgcgcgccgagggttgaaccagtaaaagaagaaaccagtgaagagaaagtgacattatcttcgcctgccaccaaagggaacaaataatatgatcgcgccgttgtattcattacttatcacggctgtcggggaatatgtcaaaaactctctacaggagcatcagctgattttattttctgaatccgttcctgacgatattgcgatgtattgcgccgtacatcagagcagtgagctgacagctgaattgtcacccgggcagataatgaaaataaatgagactatttatcgagtcacggcggtaggtagcgttgcaacggcaaatttaaaacggcttggccatatcactttaaaatttgatggcgctgccaccgctgaattaccggggatggtgcatctcaatggtgacgtcccccaggatattcagcgcggcgaccaaatctttttttatccggaactaaattaagacgtacagctaaattaaggaaattatcatgaaaacaatcgctattggtgcggatgatgccgcctatgcttttcgcgacgctatcgtcgcttatctgaatgggcagggaattaaggtcgcggattacagcagcgataaacgccagggcagcatggtctatccggatgttgcccacgcggtggcaatgtcaataaagcagggcgagcacgatcgcggcatcctgatttgcggcacaggcattggaatgagcattgtggcaaataaagtgccgggggtacgagccgcccagtgccacgatactttctccgccgagcgggcgcgcaaaagtaataacgcgcagattatcactcttggcgcgcgcgtgattggcccggagttgggcaaaaaaattattcaggcctggcttgaatccgaatatgaaggcggcggctccgcgtcgaaagtggagcgtatcgactattacgaacaccagcacgccagagattaatatccgcagtcgtaatataaggaacagactatgagccagttagacgaactgaaaaaatacaccacggtggttgccgacaccggcgatatcgaatcgattaaaaaatttgccccgcaggatgcgaccaccaacccttcactggtgctgaaggccgcgcagctcccgcagtatcaggcgctgattgccgacgcaatcggcaaggcgcgtcggcagggcggcagcccggaaacgcagctgataaacgcctgcgatcaggtggcggtggatatcggtaccgaggtactgcgtcatgtgccggggcgtatttctaccgaagtcgatgcccgttttgcctgggatcgcgggatgtgcgtgtcgaaggcgcgcaagcttattcagatgtatgaaaagaacggcatcgggccggaacgcatccttatcaaacttgccgccacctgggaggggattcgcgccgcagaggagctggaacaaagcggtatcaactgtaacctgaccctgctgttctcctttgcccaggcgcgggcctgcgccgaagcgggcgtctttttaatctcgccgttcgtggggcgtatttacgactggtatcagaaaaaccaaccgcagtcggagtatcaggtcgacagcgatccgggcgtggtttccgtgcgccagatttatcagtactacaaatcgcacggctacgacaccgtggtgatgggggccagcttccgccgtatcgagcagatccaggcgctggcgggctgcgatcgcctgactatctccccggcgctgcttgatgaactggccgccagcgaaggcgcgctgagtcgccagctggcgcccggctgcgtgacggaaacccgccccagcccgatgactcaggcggagttcctctggcagcatcatcaggatccgatggcggtggaaaaactggcggaaggtatccgcctgttcgcggtcgatcaggtcaaactggaaaatcagattcagcagatgctgtaagggcaggaaaagagacttatgaataccacaaaaaccacccgcagcctgtgcgccaacgcgctgcgagcgctgagcatggacgcagtacagaaagccaaatccggtcacccgggtgccccgatgggtatggctgacattgccgaagtcctgtggcgtgatttcctgaatcataacccgcagaacccgtcatgggccgaccgcgaccgttttgtcctgtccaacggccacggttccatgctgatttacagcctgctgcacctcaccggttatgatctgccgattgaagagctgaagaacttccgtcagctgcactctaaaacgccgggtcacccggaagtcagctacaccgcgggcgtggaaaccaccaccggtccgctggggcagggtattgcgaatgcggttggtatggccatcgcggagaaaactctggcggcgcagttcaaccgcccgggccacgacattgttgaccacttcacctacgcgttcatgggcgacggctgcatgatggaaggtatctctcacgaggtatgttctctggccggtaccctgaaactgggcaagctggtggcgttctatgacgacaacggcatctccatcgacggtcacgtcgaaggctggttcaccgatgacaccgcgaagcgttttgaagcctacggctggcacgtggtgcgcggcgttgacggtcacgatgctgactcgattaaacgcgcggtagaggaagcgcgtgcggttaccgacaaaccgtccctgctgatgtgcaaaaccatcatcggtttcggttcgccgaacaaagccggtacccacgactcccacggcgcgccgctgggcgacgcggaaatcgcgctgacccgcgaagcgctcggctggaaacacccggcgtttgaaatcccgtctgaaatctatgcccagtgggatgccaaagaagccggccaggcgaaagagtccgcgtggaacgagaaattcgccgcctacgccagagccttcccgcaggaagctgccgagtttacccgccgtatgaaaggcgagatgccggctgatttcgacgcgaaagcgaacgaattcatcgcgaagctgcaggctaacccggcgaaaatcgccagccgtaaagcgtcccagaacgccattgaagccttcggcccgctgctgcctgagttcctcggcggctccgctgacctggcgccaagtaacctgaccctgtggtccggttctaaagcgatcaacgaagacgctgccggtaactatatccactacggcgtgcgcgaattcggtatgaccgcgattgccaacggtatcgccctgcacggcggtttcctgccgtacacctccaccttcctgatgttcgtcgagtacgcgcgtaacgcggtacgtatggcggcgctgatgaagcagcgtcaggtgatggtctacacccacgactccatcggtctgggcgaagacggcccgacgcaccagccggttgagcaggtggcttccctgcgcgtcactccgaacatgtccacatggcgtccgtgcgaccaggtggaatccgccatcgcgtggaaatacggcgtggagcgtcaggacggcccgaccgcgctgatcctctcccgtcagaacctggcgcagcaggagcgtaccgaagagcagctggcgaacgtcgcccgcggcggctacgtgctgaaagactgcgcgggacagccggagctgatcttcatcgccaccggttctgaagtggagctggcggttgccgcttacgaaaaactgactgccgaaggcgtgaaggcgcgcgtggtttccatgccgtccaccgacgcgttcgacaggcaggatgccgcttaccgtgaagccgtgctgccgaaagccgtctctgcgcgcgtggccatcgaagcgggtatcgccgactactggttcaaatacgtgggcctgaacggcgcgatcgttggcatgaccaccttcggtgagtctgcgccggcggagcagctgtttgaagagtttggcttcaccgtggacaacgtggtcgcgaaagcgaaagcgctgctgtagtcctttcccccttcccgggggcggcgcggtaaagccgcgccttgcccgggctacggggccagcgcggtcgggtagtccggaccggtgcgcggcaccgccagcgggaaaagaatctggcttcaccgtagacaacgcggttgccagagtaaaagcactgttgttattttcgaccgttaaaatccggcccctcatcgctgtctggtgggagggccgttataatgttgattgtctatttcacatatatgtaacgttgtgattaacaaaacagtatcagacagacatttgtggcatgtttcttcactcggacaacagagaaggaataacaccatggccactgaatatgttgactacctgatcctcggcgacgagcatcacggcgaaatccacagggatattaaaagccactctctccgggtccgttcgaaatacgccgcctgttccgtccggggagatacctctgccgagcagccaaaaatggtgaactacaatgtccatgaatatccggcgcaggatgggcgattttatctggtggcgaccaactacccgctggccgattttgacgttgaagacgcgctggttaaatcaagaattcatccgttgagaagctagaaacgcacttcctgaagcggtcgggtaagcaccatgctacccgacctgtgaggtgattaacgacccgctttcagcttctgataatactcttcataaagcgtactggcgctgccgacatcgttctgccattcgcctttctgaatcgttgcggcgtccgggtagagcgatttatcgttggcgatttccgggcttagcatcttccgcgcggcaaggtttggcgtcgggtagccgatagtttccgctacctgtttggccacttccgggcgcagcaggaagttgatcagcttcagcgcgccatcgacgtttttggcgtttgccggaatcgacaggctatccatccagaagatgccgccttctttcggccacaccacttccagcggcgtaccggcctgacgcgcaacccacgcggagccgttccataccatgccgaggttgacctcgccttccatatacgggttcgccgggttatcggagttgaacgccgcgacgttcggcatcagttttttcagctcgttataggccgcttcaatctctttcggatcggtggtattaccggagtagcccagtttacgcagcgcgacctggaacacttcgcgcgcgtcgtcggtcagcagcaggctgctcttatactcgggtttccacagatccgcccagctggtgacggtcttcggatcgatctcttcgctattcaccccaatggccgtcgcgccccagatgtacggaatggagtagtcgttgttggggtcgaacggtttgttgagcatttcagggtcaagattgctgaagttgctcagtttgctcttgtcgatcttctgcagcatgccctctttacgcattttgtcgacgaagtaggtggaaggcacgaccaggtcgtaggcgccgtctttataggttttgagcttggcgtacatggtttcgttcgactcgtaggtcgaatagatcaccttgatgccggtctctttggtgaactgctccagcagccccggcgggacatactcggtccagttgtagaaatagagcgttttgctatcgtccgcgtgcgcggcgctcataccgactgccagagcgcccgcagcgagcaggtggcgtgaccattttttcattttaacgtcccctgagttttatcacgtgcaattatctggctggcaataaccatcaccagcgacagaaccaacagaatggtcgccagcgcattaacctccggcgataccccaactttaaccatcgaatagatcttcagcggcaggatctcataacccggcccggtgacgaatgaagagaccaccacatcatccatcgacagggtaaagctcagcagccaccctgcggccaccgcgggcagcgccagcggcaaaatgatctttcgcagaatggtcagttcgctggcgccgagatctttcgctgcttccagcatccgcacgtcaaaacctttcaggcgcgaaaataccgtgaccaccacgaagggcaggcaaaaggtgatgtgggaaaacagcagcgaccagaatcccagctgaataccgatcagcataaacagcaccagcagcgaaatcgccatcacgatatccggcgacatcatcaccacgaacagcatcccgctgacgaacggcttgccgcgaaagcgatagcggtacagcgccacggcggtcagcgagccgataagcgtagcaaaggtcgccgagagcaccgccatggtcagcgagtgctgcgccgcctgcagcaggctgtcgttattcatcagcaggctataccagttggtggtaaaaccctgccagttaatgccaaagcgtgaactgttaaacgagttaacgatcagaataataatgggaatatagagatacgcgtaaatagcggtcataaagccgccgcgcagcagtcgaccgatcattccagttccacctttttattcagtaaacgcgccgcgcgccagtaaatcagcagcatcaggcccatcaccagcgtaagcgtgatgctggtcgccgcgccaaacggccagtcgcggatgttgaggaactggctcttaatcacgttaccaatcagcaggttcttcgcgccgcccatcaggtcggaaacgtagaacagccccatagccggaagcatcaccagcaggcagccggcgataatccccggcatggtcagcggaatgatgatacggataaaggtttgtagcttaccggcgccaaggtcttttgccgcttccagcagcgggcggtcgagcttctcgatgctcgagtagagcggcatcaccataaacggcagcagaatatagaccaggccgataatcaccgccgagggggtgtacatgatgcgcagcggcgtatcgatgatacccagccacagcaaaaattcattaaggtagcccttggtgctgaggaaaatcttcaggccgtagatacgaatcagcgaattggtccagaacggcacgatcagcagaaacagcatcagcgggcgcaccttttccggtagcctggccaggaaccaggcgaaagggtagccgagcgccaggcaggccagcgtcgccagcagcgccatattcaacgaatgcagcagcacgtcgtagtagagcgggtcgagcaggcgcgcgtagttgtccagcgtaaagaccagcttgacgaagttggtgtcgtcgcgggtcagaaagctggtggcgatgatcatcaggttgggcagaaagacaaacagcacaagccagcccacgatggtggcgatcgcaacattctggaatttactggtgttcttcatcggccagcacaacctcccagctttctacccagttaatggccattttctggtcgagcgagtggtcaaaatcagggtcgtcttcattaaagaattcgctgaccatcaccattttaccgttttccagttcaaccaccgattccagcgtcatgcctttatagttgcgttcgcggatatagcctatcaggccatcggcgtcattactgtcgtggatctcgtccacgcgcaggtcttccgggcgcagcagaacgttaagccgctggcctttttcaacggcgaagttgacgtagatattgcactcgcggccttcgacgctggcgcgcacccgccgatcgtcaatccgttcaatgaccgtggcgctgaaaatgttgatttcgccgataaagctggcgacgaacaggtttttcggttcttcgtagatttcgcgcggcgtaccgtcctgctcgattttaccctcgcgcatcaccacgatacggtcggacatggtcagcgcttcttcctgatcgtgggtcacgaagacgaaggtgatgccgagcttacgctgcagcgccttcagttcgttttgcatctgcttgcgcagtttataatcaagggcggagagggattcatcaagcagcagcaggcgcggtttgttcaccaccgcgcgggcaatcgccacgcgctgctgctggccaccagacagctgatgcggtttacgttgagcaaacgcttcaagctgcaccatgcgcagggcatcgtggacgcggggcgcgatgtccgccgtcggggttttctgcatacgcaggccgaaggcgacgttttcaaacaccgtcatgtgcggaaacagcgcatagctttgaaagacggtgttcacgtggcggttttccgccgggatatgggtgatatcgtgatcttcgagatggatttggccgctatcgacgctttccagtccggcgataagacgaagaacggttgttttaccgcagccagaggggccaagcagggtgagaaactcaccgttgttgatggtcagattgaggtcggagataaccgttttaccatcaaagcttttgcgaattcccgccagctgaaccagcggagaacgcgaacgcggttgtgtattcaattttcgactctgtcccatgtagacgcagcggaaagcttaccgatgcggggtttgtggttaaccacctttggttttgcacataaaataataaggccgagcattctacggcaaacgattgtaatcgccaatgattgatgcgccatgatgaactacctttacaacattatcgtgtgaaatgtattaaattctcatttgccgggctaaaaatgacctgacgcaatatttggtttttccggcttatcaataatgttgtcacaaaagaagagggtggctacatggataaattgcttgagcgttttttgcagtacgtttctttagacacgcagtcgaaaccgggcgtgcgtcaggtaccgagcacggaaggtcagtggaagctgctacgtctgcttcaggcgcagctgcaagaaatgggactggtgaatgtaacgctgagtgagaaagggacgatcatgggcaccctgccagctaacgttgagggtgatattccggccattggctttatttctcatgtcgatacgtcgcctgacttcagcggcaagaacgtgaatccgcagatcgtagaaaactatcgcggcggcgatatcgcgcttggtattggcgatgaggtcctctcgccggtgatgttcccgatactgcaccagctgctcgggcagacgctgatcaccaccgatggtaaaacgctcctcggcgccgatgataaagccggtatcgcagagatcatgaccgcgctggcgacgctaaaggcgaagaatattcctcacggcgatattcgcgtggcctttaccccagatgaagaggtgggcaaaggggcgaagcatttcgatgttgccgcgtttgacgcctgctgggcctataccgtcgacggtggcggcgtgggtgagctggagtttgagaactttaacgccgcgtcggtgacgattaagatcgttggcaacaatgttcatcccggtacggcgaaaggggtgatggtcaacgcgctgtcgctggcggcgcgcattcatgccgaagtcccagcggacgaagcgccggaaaccaccgaaggctatgagggcttctaccatctggccagcatcaaaggcacggtcgatcgggccgatatgcactacatcatccgcgattttgaccgcaagcagtttgaggcccgcaagcgcaaaatgatggagatcgccaaaaaggtcggcaaggggctgcatccggattgctatattgagctggtcatcgaagacagctattacaatatgcatgaaaaggtgatggcgcacccgcacgtggtggagattgcccgccaggcgatggtggattgccagatcgatccgcagatgaagccgattcgcggcggtaccgacggcgcgcagctctccttcatgggtctgccgtgcccgaatctgtttaccggcggctataactaccacggcaagcatgagtttgtgacgcttgaaggcatggagaaggcggtgcaggtgattgtacgcattgcggagctgacggcgaaacgaggcgcatgaaggctataagctacgggcccggtgaggcgtcagccgtcaccgggcagtcgaagactcagtcctcaaagaaccagtagccgctgttgaccagcgcggccagcagggcgaggaaggagggatcttccagcgcatcgccgagatgctcagcgtttagcgtcaggtgggttgccagagcatccagcgccggacggtgcggagagttgatcttctcgccgttgacgaatacctcgccatcaatccgcagcacgcgcaggcccccaagacgcgtcagcttatctccctgctgcagggcatcgtaaatttcatccggctgatacggtggctccggcggcgccacgtccagctcgtgccgggactgggtgataaattcgccgaaccactgcttaaagtgctccggctgattaatcagccccagcatcatatcgcgcaggcgatccagctccgcgggcagaatatccgcagggtgctcgcgagacggtacgtccgggtcggcgtaacgctggctgcccagttcacgctgcaaaatataatcagcaaagccgctgaacagctcacgcgcgttaggcgcgcgatagccaactgaatagttgagcgagttttccagcgagtagccttcgtgcgggaaccccggcggaatatacagaatatcgcccggctccatctcttcatcaataatggcttcaaacgggtcgacctgcagcaggtccgggtgcgggcagtgctgtttcatcggcactttttcacccacgcgccagcggcggcggccggtaccctgaatgataaacacatcgtactggtcgagatgcggaccgacgccgccgccagggacggaaaacgagatcatcagatcgtcgatgcgccagtcgggcagggcgcggaacggatgcatgagcgccgccgttggctgatgccagttattgacggcctgtaccagcagcgaccagttattctcgctcaggtgatcgtagctctcaaaggggccgtggctgacctgccatttaccgtcctgatgactgaccaggcggctgtcgacttcgctctccatagccagtccggccagttcgtccgggcttaacggatcgacgaaattagcaaagccccgtttcagcaccaccgggcgtttttgccagtagcgttcgataaagtcgggccagttaagcgttaattgataatccatatttatattccacagcaggtgtctgttagggattataacggatgcggcaccagcatgatgcaggcgccgttaaaaaaccgactgttttagctctctttatcttccagggcctggcgaccaaaaataacttccatgcaggcgccgccgagcaggctctcttcggcgaggatgcggccatcgtactgggctacgatatcgcgggcaaccgagagaccgacgccctgtccggggcgcagcgtatctgcgcgctggccgcggtcgaacaccgcgctgcgcatcgcggcggggatccccgggccatcatcttcaaccagaatatgcagatggttgtcgttggtctgccggacggagacttccacaaactcaaggcagtatttacaggcgttatcgagcacattgcccataacctccataaaatcattcttttcaccgacaaaactgatttccggggagatatccagggtaatgttcacgcctttacgttgatagaccttattcagcgccgaggtcaggctgtcgaggagcggagcgatgggatgcagctcgcgactgagcagcgaaccgccgctgcgcatgctggcgcggtgcagatagtagccaatctgctgcgagatgcggctaatctgctccagcatcaccggctctgcttcattgacgctcattttctcgccgcgcatggaacgcagcgtgctctgcatcaccgcaagcggggttttcagactgtgggtgaggtcggtcagcgtcgtgcggtatttatcatagcgttcgcgttcgcttttcagcaggcggttgaggttgctgaccagccgcgtcagctcgcgggtggtattcggattgagcatctcacggtgatgctcctccagttcgcgcacctctttggccagcgattcgatagggcgcaagctccaccatgccgcgacccacagtagcgggatcaccagcagcaggttagccgcgaggacatagataaaccagctccacaccatgtaggagcgcttaagctctaccggaatggtgtcgacaaccacgatactgagctgcggcatggtgctggtggccggatagatattgatcgccaccgagtgggtcatttcggagccatcgtcctcttgccgaatggcgtccagctgttgctgaatctcatggttgttgtgctgcagcatactgctgctgtcaacgtcggcctcaatttcgtgaaagccgttgtttttgagccagtccggttgaatacgttttaccagccagggtacgtcgcgctgtgcccacagcagctggccgcgggcgtcgtaaatgagcgtcaccgtggggctttgcatattcaggttttcggggatatcaacatcgatggtgttgttttcccatttcgccagcatatagaacagattgctctcgccgcgcagcaggcggaaggtggttttatcgaaactgacgctataccccaccagcgcgaccatgccataggagagtgacaacaccagcactacggcggccgtcgccagcagaaagcgaacgcgtaacgacagcggcagaatatgccgcagcacccctttcatccgcgcagttcgaacagatagccctgaccgcgcacggtggtaatcacatcctgcggatactcagcctgtatttttttgcgcaatcgtcccatcagcacatcgatggtatggctttcgcgcagctcggcgtcgggatagagctgcagcatcagcgaatctttgctgaccactttgccccgattgcggatcagggtttccataatggtgtattcaaatgccgtcagcttgatgggctggtcgttgaccgacagctcgcgacgcgacagatccacctggaaaggcggaatggagataacctgtgatgccaggccgctattacgccgcagaagcgcctgcatgcgggcggcaacctcttcgatatggaacggcttagtgacgtaatcatccgctccggcgctcaggacctcaaccttatcctgccagccttcgcgggcggtcagcaccagcaccggtaccgacacgtcgtggctgcgccagcgacgaatcagcgaaaggccgtcttcatccggcaggccaagatcgacgatggcgatgtccggaacgtgctcacccagatagtaatccgcttcctttgcgtcttccgccgcatcgacctgatgtcccagctcctgcagctgaactttcaggtggtggcgcagcagagcgttatcctcaaccacgagtacgcgcatgccagttctccattttatttatgatattgaacaatttagcgtttattatacacctttaatataaacagctgttaaataaagaattttattcgattttttgtacctcggtctcttgggcggtgaggacaagtccatcttcggccgcgggcgacatcatcggtatcgggcgcagcgtacgtttatcgatcagtacggaatggggttccccatgggcaaacagatgcagctctccccactggcgtagcgcaacgacaacggggaacaaacgctctccttttgccgtcagtacgtattcctgataagccgtgccatccgaggcggattgcatagtgagaatacctgagtttaccaatttgtgcagacggtcagagagaatattacgcgccataccgaggcttcgctgaaaatcgctgaagcggcgtatgccatcaaaggcgtcgcgtacaatcaacaaggaccagcgatcgccgataatatccacgcttcgggcgacggggcaggtttcgtttttcattttttcacgcgttggcatgggctctccgaacggcctggtaagtagttgcattttaaaacttgatgttctagccttcaactggtttcattttgaaaccagataaccaaggtgggcatcatgaaagcgacactgatatctccagtgctaagcgatccgcaaacggttatgcctcgcagcctggtctggctgtttgctatcgccagcggcctgagcgtggcaaacgtgtattacgcgcaaccgctgctcgacgcgctagcgcgagattttgcgatcggcgacgccgcgattggcggggtgattgcggcgacccagattggctgcgcaatggcgttgctactgctggtgccgctgggcgacagggtgaatcgccgccgcctgatggcgacgcaggtgattttactgatcgctgccctggcggcggtgagtatggcttccaccgccgtgatgctattgggctgtatgcttgccgttggcctgctgggtaccgcgatgacccaggggctaatctcgtatgccgccagcgccgccgcgccccatgaacagggacgcgtggtgggcgctgcgcaaagcggagtatttatcgagctgctgctggcgcgggtattctccgggtcgattagcgatctcttcggctggcgcggggtgtacatcttggccgctttactgatgctgggcattgcgcttccgctgtggcgtcggctgccggtattggcggctgcgccgaaccctctgagctatccgcggctgttgatatccatgctggctctgctgcgccaggaaaaagtgcttcaggtgcgcggcgtgctggcattactgatgtttgccgctttcaatatcttctggagtgcgctggttttgccattaagcgctccgccctttcgcttttcccatactgagattggcgccctgggcatggtcggggtcatcggcgctctggcagcggggcgtgccggtaaatgggccgatcgcggatatgggcagcgcaccagcgccgcggccctggcgatgttgctgatagcctggtggccgctgtcgctgatggcatggtcgcccgcggcgctgttggttggcattgtactgctggatctcggcggtcaggcgctgcatgtcaccaatcaaagcatgattttccgtacccgtcccgaagcgcatagcaggctggtcggtttgtatatgctgttttatgcgtttggcagcggtttgggcgcggtcagtacgacagcggtatatgcgcgcggaggatggcagggcgtttgccttctgggggcttcggtcagtctgctggcgctgctgttctggttaataacccgggggatgacgacgagcagatgagggggaggaaaaataaccctctttcccggcggaaagagggtggaaaggtttacttcagttcgtcaaccatggtggtcgcgcggccgatatagttagccggggtcatggccttcaggcgaactttttccgcttccggcagcgccaggctgtcgatgaactgctgcatgccttcggcatcaacgcgcttgccgcgggtcagctctttcagcttctcgtacggcttctcgatgccgtagcgacgcatgacggtctgaatcggctcggccagaacttcccagttgtggtccagttcatccagcaggcggtcctgattcagctccagcttgctcacgcctttcagggtggattgatacgcgatcagcgcgtagccgatgcccacgccgaggttacgcaggacggtggagtcggtgaggtcgcgctgccagcgggaaaccggcagtttgcttgccagatgctgcatcaccgcattggccagaccgaggttgccttcggagttctcgaagtcaattgggttcactttatgcggcatggtggaagagccgatttcgccggcaatggtcttctgcttgaaatggttgagcgcgatatagccccacacgtcacgatcgaaatcaatcaggatggtgttgaagcgggcgacgcagtcaaacagctcggcgatatagtcgtgcggttcaatctgggtggtgtacgggttccactggatacccagcgaggtgacgaactcttcgctgaactggtgccagtcgacttccgggtaggcggcgatatgggcgttatagttccccaccgcaccgttgattttgccaagaatttcaatctgattcagctgacgatactggcgctccatacggtaagcgacgttcgccatctctttacccatggtggacggcgtggccggctggccgtgggtgcgggaaagcagcgggatatcgcgatactgtaccgccagctccttaaccgcgtcgatcagcttgcgccagtatggcaggatcacttcgtcgcgggcggttttcagcatcagcgcgtgggacagattgttgatgtcctcggaggtgcaggcgaagtggataaactcggagaccgcgtgcagttctgccacgtcggcgactttttccttgaggaaatactcaaccgctttgacgtcgtggttggtggtgcgctcgatcgttttgatgcgctctgcatcttctacgctaaaatcggcgacgattttatcaaggtaaccgtttgcgtcggcagcaaaagcaggaacttccttgatcgctgcgtgcgcggccagtttttgcaaccaacgcacttctacctgaacgcggaatttcagcaaaccgaattcgctgaagataccgcgcagcgcgctgactttgtcgccgtagcggccgtcgactggggaaacggcggtcagtgaggataattccatagatcacaactccggggttaaatgagcaagaatttgttttgcctggttaaccagacgattacgggaaaacatcagctgcagacgtccgccgccgacctggtgccagagcaccgcggagcgaatacctgccagcagggcagagcgaaccttcgcctgaacctgagggctttgcagcacggctggagagccggtcacctgaatccgcgggcccagcgggctaatgacatcaacatagatgccggccattgcgctgagcagggtctcggattgcagatcgaaatgttcaagctgacggcgcaggccaccgatacggttgccgagggtatccatggcccctttgctggcggcaagcttacgctcgagcaccatcaggcttagagtatagcgggtgagttcggcgttcagtccctggcgactgctggtattcagcacgccaatgagagtttccagcccgagacgaagattggcttcactaccaccgaacaccgccagcgttgaatccgggtcgaggtcgatgatgctgttcagcgacacatgcagggcgtcgctatcgcagtgcccctggtgcgccagttcctgaaccagacgcgcggcctggcaaacgccggccagcgccagcgtaatgtcataataattcttcgccacacattctccttgtaaaccgccgaatacccggttgaggcattccgcggctaatatgtctgtcaagcctgcagcggcaagcgctgttcgataatcccaccgccgaggcagacttcgtcgcggtaaaagaccgcagactggccaggcgtgacggcggcaaccggctcatcaaagatcacttcaatgcggtcatcatccagcgcttttacgctgcaggggatatcggtctggcggtagcgggttttcaccgtgcagcgcagcgtgccggtcagcggctcgcggtctacccagtgcagctgttgagcaatcaaccccacggacatcagacgcggatggtcgtggccctgggcgacaatcagaatattgttttcgacgtctttgtcgaccacgtaccacgggtcttcgccgccgtctttgatgccgccgatgcccaggcctttacgctgacccagcgtgtggtacatcaggccctggtgctcgccaacttcgtcgccgtcaacgctgataattttacccggctgggcgggcaggtagcggccaaggaattcacggaatttacgttcgccgataaaacagataccggtcgagtcttttttcttcgcggtgatgagatccagctcttcggcgattttacgcacctgcggcttttccagctctcctaccgggaacaggctttgcgcgatctgttcgtggctgagagtataaaggaagtagctctggtctttgttaccgtcgaggccgcgcagcagctggctcttgccgttaacgtcggcgcggcgcacgtagtgcccggtggcgatgtagtcagcgccgaggtcttctgcggcaaattcgaggaaggctttaaatttaatttctttattgcacagaatatccgggttcggcgtgcggccggctttatattcttcaaggaacaattcgaatacgttgtcccagtattctgcggcaaagttgacggtgtgaagttcaattcccagcttatcgcaaacggcctgcgcgtcggcaagatccgccgctgcggtgcagtattcctcgccgtcgtcctcttcccagttcttcatgaacaggccttccaccttatacccttgctggagcagcaggtaagcggaaactgaggaatcaaccccgccggacatgccgacgatcacttttttctggctttctgacattggaatactcactacattgaacttcgaggcggcgtattctagcacgcgtcatccgtcgaggcaccccctgtaaacggccagttaaattcgccgatgagcgacagcgggtagcgcggatcctgctgatagctgcgaatgctctcggcaaccagttgagaacgcaggtttgttgcgttaagaatttcctcagcactgagccacaggcagcgatcgatatcgctatcatgaggctcggtggcgcacgtatcgttaagctcgatagtaaagaggaagcgcaaaaacggggtgcgatccggggctatccactgatgcaggcgaagaaagtgctgcggcgtcgcgcgaatgccggtctcttcccagagctcgcgctctgcggcctgaaccagggtttcgtcggcttcgaggtggcctgcaggctggttccacagcgcttttccgttgatcgtttcttcaacaacgaggaatttgcctttcgcgtgaaccacgcaggcgacggtgacgtgcggcttaaacattggttttccttatggatgcggtgagtcggttttacgccattcgccgttggccaggccatccagcgtatagccgcccatcgcgtagcgaatcaggcgcagcgtcggaaagccgacgtgggcggtcatccgccgtacctggcggttgcgtccctcatagagggtgattttcagccagctggtggggatagatttgcgctcgcggatgggcggattccgcggccacagccactctggttccgcaacccgctcaacgccggcgggcagagtagggccgtcattaagcgtgacgccgtcgcggagcgcggccagcgcgtccgccgtgggttcaccttccacctgaacataataaattttaccggtgcgcttacccggttgagtgagcgccgcctgcagcgcgccgtcgttggtcattaccagcaggccttcgctatcgcgatccaaccgaccggcagcgtagacgccggcaaccggaataaaatcttttagcgtgctgcgtccggcttcatcggtaaattgcggcaatacatcgtatggtttattgaacaagatcacagtttttggctggcgttctttgcgttgtctggtgacttgttgcgtgctgaatcgctcaacgcgatgttttctaaatgaagttttttgcatggtattttcagactcaatcaattgccgcattatagcctaattacgaatgcctttcatggatgcaaacattcaggtagtattgacatgctcattacaacttattaacaaaaaggttgctcaaaccgattcgcattacaggaaggcgacacggacgcgaaatctccggttagcgggatattccgatgacgggagtgggcgagtaaagccaacgcccggctagcgtgaagagggaagagcagaaccagaagcgctcgaaggagaggttaatggaaagcaaagtagtagttccggcggaaggtcaaaaaatcaccctgcaaaacggcaagctgaacgtccctaataacccgattatcccgttcatcgaaggtgatggtatcggcgttgacgtgactccggcgatgctgaaagtggttgatgctgccgttgagaaagcctataagggcgagcgtaaaatttcctggatggaagtttacaccggtgaaaaatcgacccaggtttatggccaggatgtctggctgcctgccgaaactcttgatctgattcgtgaatatcgtgttgctatcaaaggccctctgaccaccccagtcggcggcggtatccgttctctgaacgttgctctgcgtcaggaactggacctctacgtttgcctgcgcccggttcgttattatcagggtaccccgagcccggttaagcatcctgaactgaccgatatggttatcttccgcgaaaactctgaagacatctacgccggtatcgagtggaaagccgattctgctgaagcagataaagtgatcaaattcctgcgcgatgaaatgggcgtgaagaaaattcgcttcccggaacattgcggtatcggcatcaagccgtgctctgaagaaggcactaaacgcctggttcgcgccgccatcgaatacgctatcaccaacgatcgcgattctctgaccctggtgcacaaaggcaacatcatgaaattcaccgaaggcgcgttcaaagactggggctaccagctggcacgcgaagagttcggcggtgagctgattgacggcggcccgtggctgaagattaaaaacccgaacaccgggaaagagatcgtcgttaaagacgttatcgccgacgccttcctgcagcagatcctgctgcgtccggcggaatacgatgttatcgcctgtatgaacctgaacggtgactatatctctgacgccctggcggcgcaggttggcggtatcggtattgccccgggtgcgaacatcggtgacgagtgcgcgctgtttgaagccacccacggtactgcgccgaaatatgccggccaggacaaagtgaacccaggttccatcatcctgtccgctgagatgatgctgcgccacatgcagtggttcgaagccgcagacctgatcgtcaaaggcatggaaggcgctatcgccgccaagaccgtaacctatgactttgaacgtctgatggaaggcgctaaactgctgaaatgttcagagtttggcgacgcgattatcgcgaacatgtaatctggcccccagattatgtcagaacgggaacctggtggttcccgtttttattattagttttcgaacggttatcaaaattttatcaaaacaagttatcaaaacccctcccgaaaaacctcataaggccaccgttgtccaccccttcccacgatcatcatggtacctatccgtttgttgttgagttttatgtccaagtaaatctttcgtgtttataccttgggctttatataaccgctcggaaagcgatctttgttcatggaaagttgccggtgtaccttgtccccagtcaatatctgcactgtctcttgccttgctgaaattcatggtcagtgttctgggtttcacctgtgctcctcgctcagcctgtgaggtggttctaaagaaatgaaccaaataagggcttactgcataatcccggcaacgactgattacatctcggaggctccagttgattgcgttgcaacgcagagctaatggtatagcgattttgcttccggttttctcttgctcaacgtgtagatgatcgtcccagatgtccgagaatttcatacgggatatatcacctagtcgctgtcctgttactatggctaaaagcatggcgttccccatgtatttgtgattttcatcggctatatcaaaaatcttttgccattcctcaagagtgaggcgctggcgagtgatctttctacgaggttgtttagttgctagtgcagggttataaccaggaggtacttctcccgcatgctgagcttctttaaaaacatctattaggacagagcgaatgacctgagccattctgggttgtccctccgctaaatattcatcaagaatttgcgcaacatctcgaacattgacagcggatattaatttcattcctacccgttccttaagcagagatactggttttgctttttgtttgatagtgttttctttaatatctccggacttcaatctttcctgctgaatcttccagtaacgttcaagccaggtgttagttgatattgattttcctgagctggtggaaattctgtcagtgattgccattatctggcgggtttgttgttccgccagtcttttatttgcttcaatagctattgccgtggcctctgcttcgtctgttcctagactatgaaacttaccagttatcgggtgcttataacgccagtatactttattaacctttctgctgaagagcgggtataaatttggaatagatatattatttttacgtggtctggcagccatcgttcaaaatcctctgcaaaagaacagggtcgcttttctttactacaggagtggtcaatgtaccgaccaactcagcatcctccctgacgcgccagaatcgaccttcttttttggctgggggagaaaacatattctgtttagcataattcctgagagtggaaacacttggaggattgcttctgtatttctcgtttgcccactcttcaagggttaacatctggagcatatgttttacctcatcatggcccattgctgggccagtatctgaaaatacaaaatcagttttgcatcaatttttgcagcacctgattgccggcaattattcgctgccagatcgctgatacatagcgggcctgatgaatagcatcagcgagggcattgtgacgagacccttcaaacgggatcgttgttttggggtcgaagctaatggcttggccgagctctaccattgttcgtacgtcccgatcgttccagtattcccacggataatcttcagcaatgcaatcgtaagaagaacgcagaatagagtagtcgaatgacgcaccgttaccccatacctgcgcctttttgctcccaccagcgacattatcagaaacaaattctctgaactggagtaatgcatcctgcaacgggatagcatcatcatttacgatcgcagagcgtgcttcggaggactgcttaagccaccagataacagtagatggatcgattacggcgccccagttcacggaggattcaaggcatacgactttatagaaactttctccaatagagccggttgccgggtcaaaaacaaccgcaccaatagcgacgataggggcgttatgttttttacccatggtttccagatcaaccataacgtgaacataatcaattggctgatcttcctccttattatgatgaccggattcaatatctacagaatccgtttgatgaacaacttcatctgttttttctttttggttaaccttgcccgtaacgtcaacaagaccttcaatggaaaatactccgtccccaatttttgaaacttcaggctgcctggtcttggtaaggtcttcggttacccacttcggatccgtagggtcgctaaccccttcaacatattcgccgcgctcggcggccagaacctgattagcgtccggacgttgcttttgagcctcttttaccagttcggcaccaactgctttaatgtcggaggagagtgtttccagttttgcgctgctatcctctccggcgattacttggtttgttgcatccagagtgactgcagcagatggaatatgtcccgccttggtaagcgtctcagcgctcggggtatcatgcttatgttcagtcagattcgcgttgatgtagccacgcaaccgatctggaaaaggagttattccactggatgcttccctgatcagtgcaaaaatcgctgcacgggaataatcaaggatgcctggtgtgctccgtaatgctgcagaccattctttaaatggactttctttcttctgtactatttccttcgcgcggcggtggactgatgccggaaaattatagatgtcaaaatccataggcatcgttgcaagagcgatctctatatccagagtatccagcgaatgctgataatccggattgcggtcagttttgttaccgccgccagcattggcgccggcatcggttttgtttattgaggtgatatagtttccagcagcccattcctttgtaaggatcccgcggtcaatgtgcgacgtttcaagccacaatttggcgaactgaatttgcttgccgagctcatggcgtttctccacaggaaatacgctcttaaatgcactggtaaatttccacaggccaggcatatcatattttttaagctccggaatattttctgccgtcagcagcagattctgcacaccgtgattatccgtatccatttccatcgctgaaaggcggttacgatgaggaatgctaatgtgatacacgtggcgctcgtcggccatatactgggcaagcagctgcgtgcggaatgacatttccgccaggttgaagagtgcttcttcattgttcgaataatcctcttcatcgctatttgcaggagagatatcgttttctggtttactggagggctgtggttcagcagccgctggcgcaacgattttttgccatgtcagcccgtcttcaccaccaagctcgtagcgatcgcaccaggtgtcatccagtacaccttcttccggtaagtcatcaacgatgagccagttggtgcggatcggcagctgatggctggcgccgcggccaacgttaatttcagcgtcttccaggatgtccaggattttgcgctcggcgcgagaatcggatttagcagagaaccagcagaagagacttttcgcttcgtttgcttttgccttcgctttaatgagatacgggtagttgttcattgcgtttgggctcctttggattgtaagatacccggcagctgatggcagccgccttggtggtggtcattggtcaaaactcgattccggaaagctttggtcggctgaccgggtacttaacccgccttgcgcgggttttgtgctttatggggctggcgaatcgccccgcagcagctgtgatacgcgaacgtcgtcaagcgctcgcaggataggctcaaaagttttatgggctggcagtttagataccgcagtgatcacttctgtaacggtgatgtcatcgccgcgggggctataaccaccacctgggccacgctgtgaaattaccaggttacccgcccgcagctttttgaagatctgctcaaggtatgaagtagacagctttgactctttactgatggccgtcagtgaaacgggcgagccgtcatagagcttattcaaagtggcggcggcctggacagatgccagaacgcgtttcattccaaattccataatcacttctccggccgtaacggccattggtcaaaactcgattcaaaaactcactgcaggctgttggtcgtcagccatgttttgtgcatttcggtaggggaggcactggccctgtactttttgttcatcggcgttgctgttgcaactggcctctgatggataaacaccgttcagaacatcagagcattcaccagtgagagcacaaacgctaatgacaagggcaaacagggtattcatgcctcagcctcagggtttcctttctgcgccagcaagtaacacagctggcgtagtctcacctcgaaccagttcaggcgggtcgcctggttcccggtaggtactcgggcaaaatccttcatagttatctccagttaactcagtattaggatgtggttttgcaatgcggcgccgggtgcctcccggtgacggcagccagttaacaactaccgccgacaactttttccccacaacgtgtgaataaccgccatgtttacttttttaactgtgtcgcgtgcgcatagccgcattcaccgcattgcaaaccctgattttttattttcactacttcgacgcgcttcgtcggtggtgtcgtgacgctgatcttcacgattgagctttttcaccctgcaattcaccaccacgaagcgcgcaggatttccattacatttcagaagaggcgcagtctgccggcttacctgaaagcgccgcggtaaactcgctgaaactcagcgcctcctcaccttcagagaggctttcaaaatagtcttcatatgctttatccatactcatttccttcccttaaggccgggcagccgaacgttgaacctgctgcgattgatattgctgtcatctcatccggtgtttcgtatgccgccggcagctactacgtgggcttcctgcctcgatgacccatactgcgttgtgtgttttgaagtttcacatgtcgtgaaattgttgtcaatacgaaatgtgaaatcaaaattactcattttgtgtaatttattgatgagggtacaaaaaaaccggctcaaggccggttatgcaatgcttattttttagattgagttaggtggggttgtatcttccgcgtaggtatttttctacatactcgtcaatttccttaagtctaagctcaaaggtatcgatcatgcgttcctgttcagcttcaggcaattgattgaatagggaaagaacccttttttgtttgtctgttaaccagttcgatggatcactttgttcgccaaataaaatcataacgggcgtggtgcctaatgctttcgctaaggacaatgcatcatctacaccaacgtttcgattgccatattcataattggcgacacgcgacgccccagaccagccacataatttcgcaagctgcccttggctcattcctttctcagttcttagcgccttgatgcgctcaccgatttcttcagcaagtgtcttcataccctcactttatcacgaagagtgaatattggtgattcacgttttgtattgacagtaatttcacgatatgtgaacatcgttttacacaacaggagaactgtatgaaccacatttcgcatctacggaaaaaagcccacatttcgcagcaagccttggctaaggcggctggttggaaccaacctcggttagccaactatgaaaaatctttacgcgttccaagcctagctgactctcgtcatatcgtggccgcacttaatacgttaggggttagttgttcgcttgatgatgtattccctccagaaccctcaaatcccggggagtaataaaaatgcaaaccatctcttttgaaaattatacccaagacatggcggtgcaactgaaaaccaaaaatcactattcgccgacgcgccgcgatagccagaagtgcagggccattcttgccgctgttcaggaatgggaatcttttttacctggccgtgcacaggaccacatcgcgcagctggtggctgagcaatggagaatacaaaacggtcgcggaattaacgtcaataaacagaatctgtaccgctacctgaaaaacgaatccggttcagataagtacgccagttacgttatgcagctttcaggagcgatcgctgatgcaatgcctattgagattgcgcgcaaacacggattgaaacgtggattgactgaaagcgagctggtggctcaagcaatcaaagagtgtagcgaagcgcaccaggcaaaattgcttggcgctccgttgcaaaagttagagcgtgaaattcgggaggcagcaattgcactttttaacatgcttcctgcagatgcggcgggaccactactggcgagcataagcgccgtagcgccacagtttttttaatcgagttttgacaatgagtaccgtacagaaaataggggggcttcatgagcattgacgcaatgcgatgggccaaaaaaatcaagacagggaagtcctctgcaaaagcggttctgacctggatggccgacatgtgcggagctgatctctgtgcttttccatccattcctgcgctggcagaagcaactgagctggataagaaaacggtccagtcgagcctgcagtatctggtttcgatcgggcttattgaagatacaggtgaacggcgtggaaagactaaacaaatcccggtttaccgacttcttggtgtggaagaaagcgttgctgaaattgaacacacccaaaaacgggaacattaccaaaaacgggatcgtttaaacacacccgaaaacggggttattacagcagaaaaggcgcccgaaaacgggactgtttcctgtacgcaaaacaaccaaacaatcccgttttttccgtcaaacgatcccaaaaacgggatccggaatctaccagaggaaccaaaagatataacccccacacatagggttctggtcgaaccagttgtgccggcctatccgaatcaaccgggaatagttcctggtgaaacacaatcattcggaaaatttgcgatgtatttcgggtggaaaccttccgaggatttttcccggctggcaacgatttggggaatgccattaagaccggggataaatcttgctgccgagttgagcagtttcatcgcgtactggcaggctgaaggcagggtgtttcaccaggtccagtgggagcaaaaactagcaagacatcttaaccgtgcggaagtccgccagaaaaaaccagtgaacgggggtatcgatcatgtgggagtacgagcagagccagcagcatccagagctgttcaacagattcgagccgcccgtgagcaacggttgcgagttgcaggatcagatggccgtagaaacggcatggcgcctatgggaagtgatgggcgaaatcttttcgaaccggtggatcctgaagaacggagaggaaccatcagaactctggatcgctcagattggatcgatgagtgaagcccagattacgctggtttgccggcagtgcatggaacgttgcgccgcgggcagcacatggccgccggatctcgctgagttcgtcgcgctggtatctgctagcggtgctaacccgttcaatctgacatccgatgcagtgatggcggagtacaaacgctggagaaacgagtcttaccgatattcgggaagcgacaaatacccatggaaacaggatgttctgtatcacatttgcattgagatgcgcagaaccggagttgagaggaacctgacggagggagagctgaaaaaactggcagaaaacttactcacgaaatggaccaaacacctggctaacgggttttcgattcccccgattcgtcggcagttggcagcaccgaagcatccagcagggccgacgccagcgcagatcctgatggaagagtacaaacgccgcaaggcggcgggtttaatcaagtaaacgagttttgaccatgaccaaacaatcaaaaaccaaagtaaccaaagcacagatggtgcttgccatcgttagcaggacgccagaatgcgtcctgcaggatgtctgcgatgcgctggacttgcaagccagtacagcaggtaacttgctgcggcaactacatgccgtgggaaaactccatcgtacccataacggctaccagtatgtctaccgagttgttgcaggcgttgaggttaccgatgttgccctgccgcaggctacaacacaattatctgaagaggatatgaaaaaaatccaggaagcactgtcccaggctaagacgctggaagacaaaaagctgtggcgccgggctgcgactgtttacacatcgacgcttgggatggctacaacagcaaacgaactctggttacttgccaaaatgcgtaaccgctgcctgcgcaatgcggcgaggtgctgattatgcctaaaatggaatcaacagcagctggtgcgggatgtcaaagctaagtttaaatattccggggtgaggcaaagctgagatgtccgctgagtgccagaagcggaaattacgtacatcacagtttttaatttatggacgtcggttacagcgctatgcacaaactccatacataagaggggaggccgcataagccatgcggcctttggtatcagaatgtcagttcaggcatctgttccatcacaaacgctaaaactttctccgcgttgagtgacgcatagggcagactttcaataattgcaattgaacgagagtccccgacaattttttcaatctcggagaccttgtactgaatgtgtggtgcaatcagaaaaccgtcaaaagcgggagctacactggcaaaattatccagacccacagcgctaataatgagattgtagtcctttttttctgccagcaactgcatccttttggcgagagaatttgctgtattaccaaacaaacaacataccagaagctttttcatattttacctcctgagaattgttcacagaataattctcgacatgctgataaaacgagctttgcatcttttttgcatgacaaatctccagcagagttgatgtaacccaggaaagacgaacctgccgtattgttggactgacgggatgcatctggatcttttgtgcagccgcttgtctacgacgtttcgtcatttggccttttgtcagctgttcgctcaaagcagcctcttagagacttgcgtgcggaaagattcgggttgcatttagggatcgcaatggacatcaatcagcatcgaagatgaatacgtgaatactgggcaggtatgccggataccccctcccgctccacgggcggaagggggtaaataataatgtcaggccggtctgcccgcgaataaagaagtcgctattttttttgggtgattttcgtcactgaacctgtttgagttttgtccccgacagcgccatacatcgagaccacataaacggcgccatcaggcgcggcagtcaggtggtttggtgtttcatccatcggaatattagcgaccagtttaccgtccttgttcagaacagcaacggttccacctgcacgcgtggcggcgaaaacctgagacgtcactggatcccagacgacagatacgcctccggcaccaatataagtatctgcgagaaccttaccgtccgcatcaagaaccacgacattgttcgtttcctgggaagcaacgtaaagacggccagtcgccggatcgcgagtgatgtctgttgccccctgcgcctcaggcactttcaccgtcgtgctcttacccgttttgagatcaatccaacctaaccatggcgtatcacggctgacgccgaaaagtttccctcctgcactgtcaagggcaagatcggtattgttaaacatgtttttgccatgttccactacgaactcaagttgaccgatgtgttcaagtgattttgtgtcatatacctcgataaatccggtcagcgctgcactgacataggcacgattgtgggcttcatcaataatcacatcgcgtggatgtacaacagacccttcgggaaagactttcaccacagaaagggtctttgcgtcatagacggtcaccgtctcggcaagcgtgttcgtcgtccatacatggttatgggcattatcaacaccgactccgaatactccaatctgctctccctttttgtctttaggcagcgtcgcctccgcttcgacagccagcgttcctgcgttcagtctcatcagccggctaccatccttcgggccgcgtgcagaagtcacgaagagcttcccatcggccgacactgccgactggtaagcccgctcaccgacgggaattgtttgcagcctgaaagcctcagtgtttttcgggggaacaaccttggacaatttcaacataacctgcgaaacgctcgcgggattttgcgtgataacagtgagtggatgaaggcctgtagcagcgtcggccggaacatttagtggaatagtgagatttcccttctcatcggcagccaatggcttcggcgtaaggacttcagcaccattcagcatggtgacagtcgcacctgttggcaggttcttaatcgtgatcaccgtgtgatctccgggcttaacaggaacttcccgagatccggcacgaatactacctggaaaggtcgtggtggctgctgcccattgactatcggcgtatgccgttacgacggttgatattgtaatagtggaggccaacagcactgaacggactgaaattgttctcatcttatctccataaactgtattgatgctgcatctcaatgcagccacagattattcctcacgtactgagtattaccttctgctatgagaaatatgtcttgttatgagcatactcaatatatcacgttgatgtaaatgattatcattactattttagtggtatatgaatgctaggagtttgatgttcagcgagctgagtttagggggatcgcattgtgccaagtgcggacgctcaggaatatagtttcagccactttaaaagcgaggtaagcgactcgacaggtccagcatgactaccaggtgagcgggtttcatcccatggcattgcatcatcagtgcagaagtctcctgcacattccatttcaagacgttcgtcaattaaaccaacattacagaagcatgtgaccgggtgttgccacttgtgtactgaccatcttaataaattcgagtgtacgccagaggtagcaacgtttcttatcaacggtgttgatcaccacaaaaatgactgtatccctgtgatagcggatttcgtcctttgtggagaaaagatcaatctaaacatgagcatgggttagcgaaaagtggcattaaacgcttgaacatttcacctaacaagtatactgtttatttatacagtatttgcatgaggagctagttatgaaagtggaaatcacaattgatcgccaaaaaaaattgccggatggcgctgtgcctgctctggagaaggagctactgcggcgattggatcaaaactttaataactgcagtcttgtgattcgtcgggccatctctgatgggttgaccgtgcttggtggaatggacggagataaaacacgtgtagaggaaatcctgcaggacacctgggaaagcgctgatgactggttctgttaatttgaggtccagtggcttgcctggtttattttgaggattttgctgtgagtaaaaaacaagaaatgccgaacaccggctatgcaattatcagatgcgacgatggtgtgatcgttgcccgtctgacatcctttcctgtatgtgagcgcgctttgatgtaccggcgcggcgatactgtttcgtttatgcctctgcagccggatgagatcgtggggactctctctctcttttcacagatgattgaaaaggctaagtctgtagttggttaccaggttccccctggttctgttacaatcccgtcataggcctgaacaacctatacctgctgcgtcgcggagagaaaccatgacgcaaacccccgaagtatcaaaatcccatcagactggtgctccttcatcgagcgccggtttgctttcgtcttcaaaactaacttttcgccagcaggaagttttcgatctgctggtggcctacatcaatcagcatggctacccacctacgctatctgagctggccgatatgctcggcgttagctcgtctaatgctgtcctgttgcatctgcgtgcgttagagagaaaaaattttataaaactctctcgccgtgtctccagaggaatttccatcgtcgggcgaaaggagcctgtgctcgccgtgcagctgctgcaggaaatgatctctgaagaacccggcgcgcgtgaaagagcgattgagtttttacgactgttcggtgatcagccatgaagaaaagttggtttttacacgagcaactttcagaggctgaagctacagagctggtggagcgataccgtaaaaagaactgtgtggttgagaagagcttatccagagactttgcatcgtgggagatccgcgtgttgttgccggaatcgaagaagccgccacggattgacaggacctacatacagaagatgtggagggactgatgcgagctttgcttaatgtggatattgcacgccatcttggaattgtgctgcttaagccgggtagtgaattaatgccgttattcggtgccggccgagttcttgttgaaatgccgccggcaagcatgaaaaagatacccagtggacgtcttccttatgcccggcagccgttgcgggatgatatggggatcagaccttttttcatgaagaaggcagttatcactgcagctggtggggttagtgccctcaagtcatggttgcgtaggcaggttaaaaactgtcagtggacacattccgattaccatcaccatgagctcgtcccgtttcgccatgcgacgggtgtaataatcgcatgctggcactgtgataatgagctgaaaaaccaaacggaacaaaccctcgatcaactggtaggtgttaacaacgctgactgggtaatcgacactgcccgcatcgcgcttagtctggacgctcagcgctcattgtcactggcggagctatgctggtgggcggtaggcgccggtattggcgatgaaattacagaagaaatggcgcgccgatccctgcgtattaaagacgatggcattaaatcagtttacagggagagtgagattattccgtcggtaccggccaccagtattctttctccccgtctcgaaaaaacaatcaagccaacggcaataataacgccgggcaagcctctggttcctgtgaacgtcgatcctgttgctccggcgacactattcgcgagacctaagcggagccgatggttatcagctgactttatctcatgggttaaaaaacagccgtgtatgtgctgcgggcagcctgcagatgatgcacaccatcttattggctgggggcagggcggcgtaggcaccaaggcccacgatgtttttacgatcccattatgccgcaagcaccaccgtgctttgcaccatgaccctgccgcttttgagcgtgaatacggcacccagccggtattgattattaaattgctggaccgggcatacgcgctcggcgttctttcctgaggagctttaaaaatgagagatatgtacgaaatattggaccgttggggagcttgggcggcttctgacaatagtggtgttgactggcaacccattgctgctgggtttaaaggtttgctacctcatggaaagaaaacacgccagcaatgcgatgatgatgaaggtatcatgattgacggttgtgtagcgcgattgcggaaatataagccagaagagtatgagttaattattgctcattttattatcggaatctccttacgtagcatcgctaagaaacgtaaatgctctgatggtaccatcaggaaagaattgcataaggccatggggttcattgatggtatcatttctatgatactatagtttaaatggccgcatcggcggccattttttatgctttacgttttgaatttgatcgaaacctttgcttagttatttcagagttgaaatagtcttcatccaagaagttaagtaactcttttatttcttttttatttgttggcatttctattttctcggagcttcctgagccggtcgtttttatagggaagttcaaagttagcgctgcgttttttatttcggttacagtatgatttaccaatattttagatttgtttattaatgtgacttttttcttatgacgttatctgcaagggctggaagatcaaaccccactggtatattaaaaactggttggtttacaaagtcagaaatctcttgctttgttgcttcagcaaaataagaactcatatcaaatatgcttctcaggttgttgaagttcctgaactttattttatctccttcaaggattgcaactaatttatcgtctagattgaaacccaaaagatctgacatcgtaaatgaatttttactgagccataagtatcttgactcgttaagtatctgtttttttgaaaaggtttggattgctattttgtctttcacttgaggatacgcaggagccataaaaaaagctgttatatcattaagcccaacattttttgtccacaaaggcattgcggtgctacgctgaactgcatcaagaagtatttttccttcatcaaagttatctatataactacattcattatagctaggggtatatccggcttcgaaaacaagttccgtattgtgatgactttcaaaaagagataattggtcatcaaatatttttttgattttgatgtctgtttgtctgtcggtatcaatacgatacactttcacagcagagtttttattcatcattgcaaaaaggctcatattatttccttgttacatgcataaatgtgtagtctgtaagttgaataacttcaaaatctctgttttttaaatttgtaataacttctttggatatcaacacaaatccaacgccagtatcgtcttctgcttcataaaatttaaatcctaaagcggagataagagggttgaaattatagttctcagagaaacatatataaacgataagagatatatagaaaaatactgcatattgccatttatcggcgattgaatctgtccctaataaagggaatagataactcaagaaataattggtaacctctttatttgcaggagatatggtctcaacattcttataaagagaagggaggtttttatttgcatagtgtaggaaaaaaataactgatataaaactagcaagacagatccctaacgaccaccaaataagccatggcttgtttttcatatatcctataaatatcagcgtgatacctacaggagctatcgaacttgctgttaaaagaaaccttgcaattttgttcattgaacactcccatgatactgtttttttgtacagtataaatcatgtggatgtctaatacatcatccttgtgaaaaaacactatacacaaatgagtaacgcgtacgcaaaaactatcgtaatctgttaagagtggtcacttagacacacagcttaaacatcaaacctcgccaaatggcggggtttttgcttttcaggcctaggctagaacctactgattaggctggttacctggagcctgagacctatcccttatctttccgcgtccttacttacctggaagtagatacaatgaaaacgttcaacaactggtttgagatactgagttgaagagttagtagtatggagacccccctctgtgcaccttgctgggttctactgttaaggcttggcgtttatcaaacacaggcagttatacatctgacattgacgcttcgaatgtttggatcataaattattgatgtggtgaatccccctatgcggaggggcgaccagtcagttacagaaacctgtaaatgcagcgcgggtcatgccgactggggcatgctcaccgggaagcacccgtcaccacactgccactaaacatatttaagatttatggcaggtttactttacttttgcggttgcccttctacgtttaaagaacgtaacggtaaaaacaaatgcatcctggtaaatcggtagctcggacaatcaggcgcgcccttaccgttgctccttgaaatgccaacttcagcccgcctctctcagcgggtttctttttcctcgtaaccaattcaaataaagcatcaaaaggcacagcttttcccttaactaatagccactcccgtaaatgagaaggagaggggaaggatgaattacatcgaaggctttggtcagagcaacgcatggcattgaagtaacgttatcgagatgttaagttttatgggtggtgaatccccctagcggaggggcgtaaacagttagaagcgaatcctcagcgcgagtcacggtgactgaccaacgacttaccgggaagcacccggcaccacaacttcacctcaagcccacgtaaacgcgtgggctgttcttttccagcggctctattcaaaggctgcgcatttgcgtggcctttttcatttcaggctcacgggaatcatcatcgatacggcttgttgttaaatcagcccgatgggcctgttcctatcaaacacacgcacagcacccgcacacagcgaggtgagagtatgcatcgcatggacaaactaacaaccggcattgcctatggcgcatcagctggaaacgccgggttctggatgcttcaggtgctagataaagtcagtccatcacaatgggcagccattggcgtgcttggcagccttctttttggtctgcttacgtacctgacgaatctgtatttcaaaattaaagatgaccggcgcaaagcggcacggagtggtgatgggaaacagagcgaaacttagtgcagcaatgctggccctcattgctgctggtgtatcagctcctacattgatgaatcagttccttgatgagaaagaaggaaacagccttacagcgtatcgcgatggcagtcaggggatctggacaatttgccgcggggccacgcgtatagatggtaaacctgtcactcagggtatgaaactgactcaggccaaatgcgatcaggtaaacgcgatagagcgcgacaaagcgctggcatgggtggatcggaatatccatgtccctttgaccccgccacaaaaagtaggcattgcctcgttctgcccatacaacatcgggcccggaaaatgcttcccgtctacgttctatcagcggattaacgccggtgatcgtaaaggcgcatgtgaagcgattcgctggtggataaaagacggagggaaggattgccgggtgcgctccaataactgctatgggcaggtaacacgccgtgatcaggaaagtgcgctgacttgctgggggattgaccagtgagtgcagcctacttaaagccagctatcgccgtaatgattattgctggtgcctttgttgctggtttagcctggagcgatcgggcatgggaaaagcggtgggcagaacgtgatagcgacgaatcgtcccaggaagttaacgcgcaaaccgctgcccggatgattgaacaggggcgtctgatcgcccgcgatgaggccgtaaaaaatgctcaagcgcaaacagctgcagcgcgtactgctgccgctaatctctctgatactgttagccagctgcggcagcaggcaaaaaaacttgccacccgcctggacgccgcaagccacaccgcaagtcttgccgctaccgtcagaagcaaaacaaccggcgccaccgctggagtgctcgccgacatgcttggcaaccttgcagaagaagctcgacggtatgctgcaatcgctgacgaacgctacacagcaggaatgacctgtgagcggatttacgaatcagtaagaacgtctatccccagtaagggataagatgatgtttatccctttgtggggatatcaactgaatggcctcgcatctgcggggcttttttattcgcaaaaggtaacgcgatgaagaacttaaaaattgcatacgtagacgagaagctggtggcgattgagtgtgacagattgtcatgctcatcgctgccgtttcagagtttaccatcgacagtaccgctttaactctccctcaactcatgctcgaggatgcttatgccgccacgagctaaacgaccttgccggcacagaggatgcgcgactgtgaccaatgatgtcggaggatactgtgagatgcatcggcagcaacacgctggtgatggctggcgtaactaccagcccggaaaaactcggcaggaacgtggttatggtcgaccgtgggaaattaaacgggcccgtatcatgaagagggataaatacctttgtcagaactgcaggcgagacggtattgccacgaaagcctcaagtgtcgaccacatcattcctaaagctcatggcggtaccgatgatgactttaatctggagtcattgtgctggacctgccacagcaagaaaacagcaacagagagaacccgatgaagagtttcaaaattgaatacgttgatggcgttttgaccgttctggagacggatggtcagtcacgaatgaatgaagccgtgcatggcatccattttgagcatgtccagggcggccgcccattgctgaaactgacgattgcgcatgatattgcaccggcaccggctgctgagtcggctcaggaacctttagtgggtgagctggtacaggatcaacaatctccgtttcccggcggtcgtcgttcccgccatcgtaggggaggtaagcaatgatgtataaacgcacggatctgacgctctccatgttctatgcatccagcgctgatgcggagggaaacaaagtggctacgttgacgatgcaggtaattgcagcagaggttggagccgtccagaccagccagctgcgatgtataaccgatagcgcgaagaaaaaaacgtatagcgtaggtgaacaatctgtcagtaatggttccgatccgttgctggtcgcgattgagaattactggcgtcagagcacggatgtcgtcgttaaaggattgatcgccgaggtgaccgacttcatcgcagggaacatcaactcagttagcacctggatcggtcagtttgggatgaaggttttcgagaaccagccattagatgaacggcttccagaaagcgtactgcaggccgatggaggatctgctacagcgacaggatcctgaccgccggtataacaactggtgttcattgaacgtctgagatatgccggcccacgcagtgcgaaccgtattcgccgccggcgcagccggaatgacgacctccacctcgactgaggctgctgcagccaggggggaggggggatcaaatccctgacccctttcgcgcttcgggactgcccgttgaagtctatttttacacgccagaaataagcaacttttttccggaaggtttcatctatcaaaggaacgtttatggccggaggaattcgatcgtccggtggtggccgaaaacccactttacccaccgggcaaaaaagcaaattaacacgtattgcgcctcccgctgagttaatgggggaggcggcaataagaatgtggaagacgcaaagcaaaatactcatcgaccgaggggtgtttgagctggaggacgcacctttgttgctggcttactgcaatgcttttcatctgatgctcgaagccgaaaaaatgctggccagcggactgacctcagaaagtgaaatgggggggctgaaaaaacaccctgcagttaatgtccggaatgactcggtttcccagcttgcccgcctgggctctctgttggggttagatccgctcagtcgtcttcgcatgaccagcggacaaaaggatccggacgatgacgggaatgaattcgatgagtttgactgatggcaacctatccgaacgtcaatgcagcgaaccagtatgcgcgggatatcgttggcgggaagattctggcgtgtcagttaacgatacttgcctgtcagcgacatctggacgacctcgaacgagcaaaggatccccactggccctaccgcttcgataaaaacaaagcagaacgatttcttcgttttgcccagaaaatgcctcatacctcaggggaatgggcccggcgtaaactccggattgaatttgaagcctggcagaagttcgctcttggcgtaccgtttggatgggtacacaagaagacaggcctgcgtcgtttctctgaaatctatatcgaggtgcccagaaagaacgggaaatccgctattgccgctgctgtaggaaattatatgttttgtgcagatggcgagcatggtgcagaagtctattgcggcgccacgactgaaaaacaggcatggaaggtattttctccggcgctgcaaatggtgaaaaagctgccggcattgcggcaaaaattctcgataaaaccctgggcaaaaaaaatgacgcgccctgacggttcggtttttgcgcctgtgatcggtgacccgggggatggtgattcgccatcatgcgccatcattgatgaatatcacgaacatactactgatgcgctttacaccaccatgaccaccggtatgggggctcgtgaacaaccgatgacactgatcatcaccaccgccggctatgacattacatccccttgctatgaaaagcgtactcaggttgtcgagatcctgcggagaacccgtaatggcgaggaaaatgaaaccatatttgggctgatttatggccttgatgatgatgatgactggacgactcctgaggcattaatcaaggcaaaccccaactatggcatttcggtaaaagcagattttctccgggcgaaacaattattgggtatgtcgacgcccgggcagacaaacaagattctgaccaaacatttcaatcgctgggtaagtgcaaaatcagcttattacgacctgagaaaatggatggatgcggccgataaaacccttaagttgtcagattttgaaggggaggaatgctggctgggtatcgatctggcctcgaaagttgacctcaatgccgtggttccggtttttcgtcgtgaaatagacggaataacacatttttactgtgtttctcctctgttctgggcaccggaagaaaccatttactcgcaggagaccgcgctgaagagtaccgcagaacgttatcagtcctttgtccggcaggggaagttgatcccgaccgatggcggtgaagttgattacagactgatatttgaaacgatcctgaaattgcggaataccgtaaaaattgcccaatgccccattgacccttatggcgcgacttcattacgtcacatgctcgaggaagaggggcttgagcctgtcgagataagacaaaattttacccatatgagtgatcctatgagagagattgaggctgcgctcatctcggggagattccatcatgacggacaccctgtcatgaactggtgtatttccaatattgtcggccagtatcttcccggaagtgacgatattgtgcgtcccgggaaggaagggcggcagaacaagatagatggtgcggttggtttaatgatggggctggggcgcgccatgcttaacagttcagtgatgacatccgtatatgatgaggaagatatagcatgctaatttcagttctgagttttattgtcggcctcactggtgctggattgttatcagcaggcgcttggcttatttctccatcagtgggattgataacaggagggattatttgtctgggctggtcatatatgacaacccgggccttttcctccggcgtcagcaatggcggaggtgaataatgttcctaccccagatgttcaggggccgacaatactcgggtaatagcttctgggaagccatgctgggcggggttcgttcaagccagagcaaaactggcatcataatcacgccggaaaccgctcttggactttcagcggtccgggcctgtgtcaccctcctggcggagtcagtcgcgcagctgccgtgcgaactctaccggcgggataaaaatggcgggcgccagcgtgcgacggaccacccggtttatgacctgattcactcccagcccaacaggaaagacacctcattcgagtatttcgagcagcagcaggggttgctggggcttgagggaaattgctactcgatcatcgaacgggacggaaaaggctacccgaaagagctgatccccattaacccgaaaaaggtcattgtgctgaaagggccggacggtatgccgtattacgaactcccggaagtcggtgaaattctgccgatgcgcatgatgcaccatgtgaaggtcttttctctggatggctatatcggcagttcccccattcagacgaacgccgatgtcttggggctgaatctggccgttgaggagcatgcggcagcgacatttcggcgcgggacaacgatgagcggggtgatagagcgtccgaaagaggctgcgaccattaaaagccaggatgctattgatcgcctgctggcgaaatggaccgaacgccattccggtattcacaatatgttctctgtggcactgctgcaggagggcatgagctacaaacaactgtcgcaggataacgaaaaggcgcagctgctacagtcgcggcagtggggcgtggaagaggtctgccggctctataaaatcccgccacatatggtgcagatgctggcgaaagcgaccaacaacaacatcgagcaccagggcctgcagttcgtgatgtatacgctgctggcctggctgaaacgccatgagggtgcgatgcagcgcgatctacttctgcccagcgaacgccgcgatttgtacatcgagttcaacgtttccgggctgctgcgaggcgaccagaagtcacgctatgaatcgtatgcgctgggccgccagtggggatggctatccactaacgatatccggcgtatggagaatctaccgccaattgctggcggggacaaatacctgacgccgctcaatatggtcgacagcgcgaagatccttcctggcgataagtcgccgacagcaaaacagctggccgaaatagaatcccttctggccagagcctgattatttcccgccgcgcgggatgacctggaagacaacatgacaacgaaattaattaacctgccgcacctggcagatatggtctttggcgtgccgcattacgtgacgcggcaaacaatggactccgtgaaagcggtgctcatcccccgtattcaggggatcaccgaagatgccgtcattcagatggcgctgaatccgggtaaatcacctgcagctgagcaggttcagcccaccggcggggtggcagtgatccccgttcacggcattcttgttccacgccgggggcagattacggcgatgtgctccgagctgaccagctacgagcggatccgcgggcagctgcaggcggcattaaacgacccctcaatcagcgaaatcgttctggatattaactccggcggcggcgcagcggtggggtgcaaggagctggccgattacatttatcagtctcgcgacacgaaacccatcacggcgattgtgaactacagcgcgtattccgccgcgtatttcatcgcatcggcctgcagcaaaatcatcgtcagccagaccagtggcgtggggtcgattggtgtgatcatggagcacctcgatacgtcgaagatggaagaaaaaatggggctgacgttcaccaccatttaccggggagataacaaaaataacggcacccaacatgaaccactgagtgaagagtcgctgggtatgttccagggcatgatcgacgaaatgtacgagacgtttacggggtcggtggccgaatatcgcggcctgaatcagcaggccgtcattgatacgcaggcggggctgtattttggccctggcgctgtgtccgccggcctggcggatgaagtctctgacccccaggcggcgatcaatgctatcgcggcaaagtatcagcaaccccgtcaaaaaacctccattgagatgcaggcagccgcgatggatctgcaaaccaaaatgtaacccggcgcaaacataaaccgcgtcaccttaagcagccagcaggctgctttttttatgtctaaaaagagagaaataaaatgccacatattgaagaattgcgtcgtcagcgtgcgggtatcaacgaacaggttcaggccctggcaaccattgacgccagcggcagcacgctgactgcggagcagctgacggagtttgcgaacctgcagcagcagttcactgatatcagcgccaaaattgaacgcctggaagccgccgaacgtgctgcggcgctggtcgcaaaacccgtgaaagcgactcagcaggcccccggcattattgttaagcaggagccgaaacagtacaccggtgctggcatgacccgactggttatgtctgtcgccgcaggcgcagggaatctgcaggacgcggcaaaattcgcttcagaagagctgaatgaccagtccgtatcgatggccatttccaccgcagcggcgtccgggggtgtgcttattccgcagaacctccacagtgaggtgatcgagctactgagcgaccgaaccatcgtccgcaagctgggtgcccgtcccgttccgctgcctaacggtaatatgacgctaccacgcgtggccggtggagcaacggcaagctacacaggagaaaacaaagacgccaagacatcagaaacacgctttgatgatgtaaaactgacggcgaaaactctgattgcgatggtgcctatttccaatgcactgattggccgcgccggattcaacgtcgagcagttggtcctgcaggatattctgaccgccatctcagtgcgtgaggataaagcctttatgcgcgatgacggtaccggcgatacaccgattggtatgaaggcgcgcgcgactcagtggaaccgcctgctgccgtgggaagctgatgcagcgatcaacctgaatacggttgacgagtacctggacaagatcattttgatggcgatggacggcaacagcaacatgatcagcagcggctggggcatgtcgaaccgtacctatatgaagttgtttgggctgcgtgacggcaacggcaacaaagtctatccggaaatggctcagggattacttaaaggatatccggttcagcgtaccagcgcgatccctgcgaatctggggaccgggggtaaggagactgagatttactttgctgacttcaatgatgtggttatcgctgaagacggcaatatgaaagtcgacttctcgaaggaagcctcttatatcgatgccgatggcaccctggtatctgcgttttcccgtaaccagtcgctaatccgcgttgttactgagcatgatattggcttccgtcatccggaaggcctggtgctgggtaccggcgtcctgttctaacccatccctcagtaaataaggcccgcatatgcgggcttttccctttcaggagaatgttatggctgcgaaaaataaagcagtggagccggaagaaacggtcgcacaggacaaccatgcgaccgtggtcgcacaggcagagcgtaaatccgttgtgttccttgggccgcaccaccgttattcccgtggagatatcgcgtgctttgaaggaacgcgcgccgaagaactggttaagcggcgtatcgcggtatggccggaggatgccgaacgtgcgctgaaaccgaagccgggagacagcgattttgatactgacattggatgatgtgaaaacccagctacgcctggaactggacttcacggagcatgatgccatgctcacgcaaatggtgaacgccgcgcagcggagcatcgagcgtgattactactgcaagctggtcaccagtgatgaagagctgcaggcgctcccggagaccgtccgcggatttatcgcggatgaagatatccggctggctattcagtttctggtcagcgatgcgtatctgaatggccataccggacagtggctggaaaccgctgcggtgaggcatcttcttttccccctgcaggagcatacgctatgagcctgaaaccgggtgatatgaactgtcgcattgcaattagctacgttcagtccggtcgtgggccgctgggcgaaccgctcccggaaaagcaggttgaatcgggaaaagcgtgggcaaaacgggagctggtatcggggcgaaaagtccgcacgctggatcagcagcaggtggtggaaacctgcctgtttacggtctatccgggcgtgctggttgatattgactggaaaatcacgacgaaaaatctggtttataccgtccggaatatcgaccgcaaaacagaccggatcattatcacgggggaggctgacgggcggcatgatagagctggcgattaagggtacgctggagcgcatcaccggcatgaatgcgtatccgcttttactgccggacacggtccaggaaggagcgacctttcagcgtatctctgacccggagatggtctcgggaatgctgcgaacggggatcgtctctgcccgtatccaggtgaacctgtaccttctcgataattacacctcactgctgcagctggataaaaaaatctgggcggaactgaagtcagtcgttcatggccagctggagggcatcccggttcagtatgtggagcgaggcggtatccatcaggataaaaaccagctgacgaatcgtcgcattcagtatcgcctgacccgcgatttcatcattcactacgtggaggactcctcgtgatccgaatggaagttaaagggctggatgagctggagcggcagttaatggccctgggcgaaaaagtggcgacgaaggtattgcgggatgccgggcgcgaagcgctaaaggtcgtcgaggaagatatgaagcagcatgccggctttgacgaaacgtctgccgggccgcacatgcgggactcaatcaaaatccgctcttccacccgcaagggtaaagggaacgcggttgtaacgctccgtgttggccccagcaagcaacaccatatgaaggcgctggcgcaggagcttggcacggttaaacaggttgcagacccctttatccgacccgccctggattacaacctccagaccgttttgcgcgtgttaaccgtggaaatccgaaacggcattgaaaacaggtagcatccgctgccgtataaaaagagagagaaacatggctgataaaacttcgcctgaatatgcgatgttgccggcgggcaccattgtgaaatacggggagcctggcgctgccacgtcagcgctgaaaccgctgattaactgtaaagcgctgggtgcaatggggcagacggggggctttgtcgactgcaccacgttactggataagcagaaacagtccatcagcgatctgcctgacgggcctgaaaagtcgctgggcttcattgatgatccgggcaataccgattttgccgcgctgctgaatgcagcagaggcccgcaagaccatccagttatacgtcgaattacccaacaagcgaacagcgacgatgctcctggcgctgtccggctggcagatgaatgaaatcgccgctccggcgaatgaggtcatccagatcactgttcagggtaagcagaacaagatcacctggggaaccgtcgctgtctccggcggcgcctgattaacttaacctgtaaacagccaccttcgggtggctttttatttttaaggactacctgtgaaagataaagattacctgtccacgctgaaatccgcgttgcttaaatcggagccaaccgtcattaaaaccgagttgtttggcgccaccgtattcatccgccgcctgaccggggattacctcatcagctacgaagagaaaatggctgaaaccgcaaaagctggcgcagcgcgcgaggcatcggagcaagtcatccagatcgtcatcgatgcactggttcagccggatggaacggccattccggatgagtttaaacccacggcagccgagctgctgaaggcccatgaaaaccccgaactgctggccgcagtggaaaaagtgaagcaacacgcaatcggcaagctggaggaagcggaaaaaaactgagtgactcgccctggctggagctgattttctggctggccgaccgctggggcgagcctgacccatccaaaattgccgcgttgccggcaaacactctgtaccactggcgagcctacttcctgaaacagggcactttccgccgtcctggcgatgaaaacgcgccaccaaccgaaaccacacctgcgccatcccgggtcgatgatgaatgcgcggcagtcatgagggcattaatgtaatggcagacgtcgcatctttagcggtcgggctgcacctgaacgcagccagttttaaatcccagctgctgggagcgtatggcgatgcggagaaccagtcacgacggtttaaccgtaatgcccaggcggacgcgaaaaagacggaagacgcctataagaaggtcggtctgtcgatatccgggatggccagccggctggcggggctggcaggagccggcctttccatcggtacgatcgtcaccacgtccagacaatatggacaggcgttatcagatctgcaggccatcaccggtgcgactgcagctgaaatgaaagcgctggatctggctgcgcaggaaatggggcgcacgacagagtacagcgccagccaggccgccgaagcgttaaagctgatggcgtcggctaaaccggagcttttaaaaacgtccgatggactgcagaaggctacgaacagcgcgcttatcctggcgcaggccgccggcacaacgctgcccgatgcgaccagaacgctggcgctctccttaaaccagtacggggcgagcgcgcaggaagcggatcgttatatcaacgtgctggccgccggcgcgaagtacgggtcgtcggagattgtggatacagcggccgccattaaaaatggtggcgttgcagccgcacaggccggcgttggttttgagcagctgaatgccgcgattcaggtgctggcagagcgtgaaattaaaggcggtgaagccggcacggcgctgcgtaacgtcatcctgaacctggaaaagggcacagacaagagcctcaagccatccgtggttggtctcagccaggcgctgaccactctttccgggaaaaatctatccacggcccaggccgtaaaactgtttggcgtggagaacctgaatgcggcgtctatcctggtccagaaccgttcaaagcttgatgagctgaccgcttccctgaccggtaccaaaacggcgcatgagcaggcatccatcagggttaacaacctgaacggcgatttgctggggctgagcagtgcgtttgaagggatggtcattaagatcggccagagcagtaacgggccactccgcagcgggattcaggttgccacggaggcactgaacagcctggcagacaatttcaacaccgtctccagcgtggcgctttacagcctgatccccgtgttatccacgaaactgactgcagggctgcgggagaatatcgcggcctggcgggaaagccaggcggcggtaaaagcgcgggcgcaggctgatgcggatattgcccgcaaaactctggattcgacagctgccatcctgaaacagaacgacgctgagtttggccactaccggcagatggagcggacggctaaacagtacgggatgaatatcagttaccaggatgagtttacccgcctcatccgacaggaaactgaacaaaccaatctggccagccaggcgaaactgaaactggcggcggcaaaccggcaattgtcgatatcagcccgcgcggcctccgttgcggtggggctggcaagaggtgcattaaatttaatcggtggtccgttcggcgccgcgatgctggccggttcgggcctcctttactttcatgagaaagcaaaggaggccaggcagtcagccattgatttaaaagatgccgtagtcgaaaccagtgaagcgctgatgcgcctctcgcttaaccagctaaatgtgaagcagttcgacctggaggatcagtacgaaaaccaggtcgtgcagcgtaaccagctgatgaaagagattcaggatgccgacagtcgtatcgacagcctgaaagggtttgaccccttcggccagctggaaggggtaacaaaaggccaggcgcgtgcacgggcggatctcgatagcgttaacgagggactccgcaaaaccgaggaaaacattaagcgtgtcagtgatgcaaaaacactggctcagctgggtttatcgggaaaaataacctcccttacggacgatctgaaaggggcgttaagcacgccccccaaagagaccggagatggaaatccctggggcggcgatggcggtaccggcacggggaaaggcagtaagtccaaggtcgaccagttcaaaacgctgcggcagcaaattgaagaagcccatgcgtccagcctggccagaattaacctgcaggaaaaggacagtaacagggagctgcaggaagcggcgaagaaaaatggcgccagtgatgctgacctgcagcgcgcgctgttaatgaccgcagagaattaccagaaacagcgactggatctggccgcgcagtattcccccgcccaggaaactctgcgaaaagagcaggaagccagccgggacctggctgagcttttcaaagcccgccttcttgatgaaaaagagtaccaggccgcacgaataacgctggccagagatactgcgaaagagctgctgcaggcgcatgccgatgaaatcgctgcgccggcactggatatcgccggcgaagttgatccactggtctcgctgcgcaatcagcttgcgcagcggcaggcattgctgcaggcgtactaccagggcagcgcgatcagcaaagaacagtacgaaatgctgatgcagaaggcgacgaaagaatccgccgatgcgcagtatcagacgtcactggagttataccgatcacagggagaattccagagcctggccgtcgggttatttgaaacggcccatgagcgctcaagcaacttcctgacgagcatgctgacgcggacgagaagctttaaggagaacatggctgacctgttttcctcgctcacgcagtcgatcataaaaaacctcgttgatatggccgctcaggcgctggtcaccagttccgtcatgcaaaccattatgggcgtggtgggcgtcgggaccagcgttgtcacgggcgctgcgggcgcaggctcggggacggcgatccagaatgccgccagtaacttccagttcaacgccaaaggcggcgtttacgactcgccgtcgctgagcgcatacagcaaccaggtctacgactctccgcagttcttcgctttcgcaaaaggggccggcgtatttggcgaggccgggccggaggccatcatgccactgacgcgtgccggcgatggttcgctgggtgtacgcgctgtcggtggtggtcagaacgccggcgcgtcggaagggccaaaagtctatatcacgattgaaggcggaaacacctcaacgcaggcgccgtctggttttgagcagtttggccagcagatcggctcgtttgtggagaaaaaatacagggagctgatggcgcaggatatgcgccctggcgggatggtctggaatgcagttaaagggcaacgctaatggctattgagatattcacctggagtccgcgggttaatccccagcagaccgttaactttcgtgtccggaaggcgcagttcggtgacgggtatacgcaggtatccggcgatggtattaacacccgatcacaggattgggagctgagttttgtcggtacggaggactatatccgtccgattaagcagttcttcgaccgtcatgcaggcacccgcgcgtttcagtggaccccgcctctggaagaggtggggcttttccgctgcgaacaatataaaccggtgcctctgggcggcggaaattactcactttcagccacttttattcaggcatttaaaccatgagccttaacgcgaattatcagaagttagagccaggcgatgaggttcgtctcctggagatcgatggccaggcgtttggcctggatgaggttttgtatttccacggctataacgttccccatactgcagccgaaatcctcgccgctggcggcgacctggataagctgccggcgaaaagcatctggtggcaggggcgggagtataaagcctggccatgtgaaatcgaagggatcgagtcatccaccacgggcagcgacgcgcagccaacgctgcgggtagggaatatcgacggaaagatatccgcgctctgtcttcattacgacgatctggctctggcgcgggttgtcatccacgacacgcaaaaacagtatctcgatgcgaagaactttccggaagggaatgcctcagccgatccgacgcaggagaaacggcgccttttcttcatcgacgtaaagcattatgaagacgatgagaaggtggaatttactctctccagcccgtttgccctgcaggggatgatgatccccactcgccagctgcatgcgatttgcacctggtgtatccgcaatcaataccgcagcggtaacgggtgcgactatgccggcacccgatattttgacaggaacaatcagccagttgatgacccgtcgcaggatgtctgcaacggaacgctcacggcctgcgaattacgtcatggtgagaatagcgaactgccgtttggcgggttccccggcacttcattaatcaggagctgatatgcgtcagaaaacgattaagtccatccaggaacatgcggccgcagaatatccgcgcgaggcctgcggcctcgtcgcccagaggggccgagcggagcgttatttcccctgccggaacctggccacagagtcgaaagataattttgtgctggcgccggaggattatgcggaggttgaagaatggggaacgatcaccggtattgttcacagccatcctgatgccaccacccagccgagcgaactggataaagcgcaatgcgacgcgacccttctcccctggcatattatcagctggccagaaggcgatctccgtaccatccacccgcgtggtgagttgccgctcctcgagcgaccattcgtgctgggccactacgattgctggggcctggtgatgagctattttcggcaaacccacggcatcgagctgcacgattaccgcgtcgattatccgtggtgggaaaaggagtatccggacaatttttatcaggactgctggtatgaatgcgggttccgtgagtttgatggtccaccgcaaccgggtgatatggtgatcatgcaggtgcaggcggataagtggaaccacgccgggattctgctggaagggaacctgctgctgcatcacctgtatggccatctcagcaagcgcgtgccgtatggtgggtactggatggaaaggacgatgaaggtcgttcggtataagtctctatgttaatatttcgtcttctttaaaaggagatgaattagtgaaaattattttagcattgccgattattatcggggcattcattcttactggttgtaagtcaccttcggaagtccgtcagagtggtccggaagaaatatttcattcgaataagaatgtgaatgatgtttctgagtgcattttatcaggctggcaggaaaaaagttttctaacaggacctgtcccggtatatattcagccttataaaaacggtaagactgtctatatagacgtatatacttgggttgcagatgtgattcctgaccaagatgggaaaagtaaagttatttacttctctcaaaatgccagaagaagcgctgaaatgaaatcggtgatcaaatcatgcatataaaaaaggtgtggttttatgattacagttcaggagtcaatggttaatattgagctgagcggtgaattaggaaagcgatttggtaaaaaacataagcgcctagtagccactacaaatgaagctattcaggcgctttgctgtacgatcagtggctttgaaatgttcatgaataaagcgaaagaacgaggattgacttttgcgatattcaagaacgggaaaaacatagggctaaatgatttttcttatcctgttaatgatgaaactataaaaatagtccctgttgttattggcagtaaaaaagcaggggtattgcagactatccttggcgcagtaatcatagctgctgccgttatgcttggacctgccggcgccggtgctttagccgcaggtactgcgtggaatgtcgggttggctggcggcgccatgatgctcggcggcgtcgttcagatgctttccccacagccagctggcctggcacgaaaagaatccgctgacaataaagcgtcctacgcctttgggggcgtgacgaacactgcctctcaggggtacccggtccctttgctttatggcaaacgccgaattggcggcgccattatatctgccggtatttacgtagaagaccagcaataagttttattcagtaaaccatctaattcaggccaccttgcggtggctttttttatgggcgtaatatggcaaataacataattaaagggcgcaagggtggcggctcaaagcagcgtacaccgacggaacagccggatgatttacagtccgttgcgaaagccaaaattctgctcgcattaggtgagggtgaatttgcaggtggtttaaccggtaaagatatttatcttgatggcaccccgcttgaaaatgctgatggttcgcaaaacttcagtggcgtgtcctgggaatttcgacccggcacgcaggctcagacttatattcagggtattcccggcactgaaaatgaaatcagtgtgggaacggaagtttccagcaagacagcctggacccatacctttactaatacccagctttctgccgttcgtgtccgcctgaaatggccgtccctgatgaaacaggaagatgacggcgacgtggtgggcaataccgtcgagtatgcgattgacctgcagaccgatggcggcgcctggcagacggtactggaaaccgctgtcacgggtaaagccacctccggctatgagcggagccatcgtatcgatctgccccaggccggcagtacctggacgctacgcctgcgtaaaatcactccggatgcgaacagtgtcaaagtcggcgacgtgatgacgctgcagagctacaccgaagtgattgatgccaaactgcgttatcccaacaccgcgttgctttatatcgagttcgatgccagccagttgaatggcagcattccgcaaatttcctgtgagccgcgtgggcgcgtgattcgtgtgccggataactacaatccggaaactcgtgaatataccggggtctggaccggcgggtttaaatgggcctggacggataacccggcctggatctattacgacattgttacagctgaccgttttggtctcggtaatcgtctgagcagcgccaatatttcgaaatggacgctgtaccagattgcacagtactgcgatcagctggttcctgacgggcgtggtggtgacggcatggagccgcgctatacctgtaacgtctatgttcaggaacgcaacgatgcttacaccgtgctgcgagactttgccgccattttccggggcatgacctgctggaacggtgagcagattgttgtgcaggctgatatgccgcgtgatgtcgattttacctatacgcgcgccaatattatcggcaaaccccgttattcgagcagcagcagccaggttcggtacaccaacgccctggtttcctggtctgatccggataatgcttatgctgatgcgatggagccggcgtttatcccggaactggtttcccgctacagttttaaccagctcgaactgaccgcgattggctgtacgcgccagagcgaagcccaccgtaaggggttgtggggcatactgaccaacaacaaagaccgggtcgttgagtttgatgtggggctggacggtcgcattcctcaacccggttatatcattgccctggcggatgagttgctggccggacgggtcaacggcgggcgaatcagcgcggtgaatggccgggtgattactctggatcgtgatgtggatgccaaacctggcgaccgtctccagctaaacctgccatccggtatctcacagagccggaccattcaggctgttaacggacgccggcagattacggtcacaacggcgtacagtgagacaccagaacgggaatgcgtctgggccgttgaatccgatgacctcttcctgcagcagtaccgggttacaggggtaaaagagaacagcgatgccaccctcacgatcaccggcgtggcacatgacccggataaattcgcccgcatcgataccggcgctattatcgaccagcgcccggttagcgtattgccggcgggcaaccagtcacctcctgacgatattgtcatcacatcccgctcggtcgtgaatcaggggatcagcgtcgaaacgatgcaggttaactggtcagctgtcagcggcgctattgcctacgaggcacagtggcgccgtaacgacgggaactggattaatgtgccgcgcagctcgaccacctcgtttgaggtcagcggcatttatgccggtcgttatctggttcgcgtccgcgcgatcaatgcggcggagatctcgagcggctgggcgtattccgaagagaaaaccctgaccggcaaggtcggcgagccgctggcaccgctggcgctggcaacccgttctctggttcatggggtccaggttagctgggagttcccgaccggctccggggatacgctgcgcacggaactacagtacagcaaaaatcaggacggcagtgcgccgatgccgttatcagacgtggcctatccggggaaaagctatcagcagatgggcctcagtatgggcgcagaattctggtatcgggcgcgtcttgtggatcgtcttggcaatgaaagcccgtggaccggctgggtccaggggatggccagcgataactttgatgactactacgaaaacctgaccgacgcgatcaaggatacggctgcctgggaggaaacgcagcgcaccattagcgaaacacaggaaggtatccgcaatacgcagcaggaactggagcagaccgctgaagctctgcgtaaggaagccgaagaccaggcgaagcaggtcagccaggatattgatgcatcggcgaaaagcatcacggctgatgttgacgggaagatctccgccgtgaataaaaccatcacggatgagatcacctcggtcaatgaggctctcgattctggtctggctcaggcaaacaaaggcgttcaggaggcaaaatccgccgtcgcagatgcgaacaagcagatcgcaactgtgaacaagtcgctgaccgacagcatcacccaggtaagacagtcagtcaccgatacggctgcggaaatcaacgccaccatcgacctggagattgccagggtcagcaaaacgctggccgacggcgatgccgcattgaatgcgcagataaagactgccgaaaatggcctgaagcagtcgctgtctcaggtcaacaccacgctgaccaatgcggtgaagcaggagaccgcggatcgtatcgccgatgttaacgcgaaggcgtcacaggccgctgatgaactgctggcggcaacgcaggggattgaggcgagtatcgagagcctgactcaggtgatgaagaccgccgatgaaaatctggcgcgggaaatgtccagcctcgctgccggcgctaatatccagttcgattcgcaggttatctggcatttcaacaatcagacgaccgagggctggaccggcagcgccggcgtaccgggtgtgtcacaggatggctggttacgcccggcggacagcgccaccgatccgtacattacctctcctggcgggctggctgtcgatggtgcggcgtaccgtttcatcatgctgcgctttcgtaaaaccggcaaaccagtttgggcaggtgagatccgctgggtgtctgccggcgaaaacttcaataacacgaagcgatacattgttgctgagccggaatatgccgatggggtggcaaccctgacggtgcgtgatattccgtggacagggaacattgatcgtattcgcctggacctgacgaaccagcaggatgccagcaactttatcgaattcgactggatcgccgttggccggccagcacccggcgccagtacggcggctctgcaggatgtgcgcagtacgctgagtaacgcgctgaccgccgaagcacaggcacgcagcacgctggcggcgcagatgcgtggctcctatgatgggagcgatctggagaaagtcacctccgggctgctgtaccaggaaaaaaccgcgcgcgttaccgccatctcggcggaagttaaggccagagagtccctgcagacgcagtttaacgacaacaaagctgctgtttctggtgaactgagttctctgacgacagagcagagcgcgcaggcgagccgtatcggtggcctggaaaccagcctcgggaaaaaagccgatgcggccgcgctgacgtccctgacgcagaaagttgagcaacagggcgccacgctgacatctcagggcgccgcgttaacatcgctcactaaccgggttggccagacggaaacgggcctggctggtacgaatgaggcactgagcgggctgcagtctgttgttacccagcagggcgacaggataaccagccagggtcagtccatcacgaaactgacgagcgatttgggcacgacaaatgccgcgctggcgaagaaagccgaagcggctgcggtcactgccttaacgcagcaggtagagcaaaacggacgggatattcgcagcaatactgacagcatcaccagcctgtcgaatcaactggtcaatggccagccgaatcgctggtcccgtcgactctatccggtgcagctggctaacgccgggacagtcccgtcattcagcgatgttcgcgctgtggcaccaacggtagtggatgaggtggccgacgcggccaaactggactttacgtccgccggcagctatctgatcgcgctgtattcctgccaggtgaaagtggccgcagataccaccatcacactggcgcccggcgccagggtttttgatgataccggcgccatatttgtgaatggggttcaggtcgcctggggtaacgccagctggaataccgtcagttttgaactgaaagccggctggaacaccgttgagtttctggtgaatcagtggaccggccaggcgtatatcaacctgggcctgaagctgtcagacaaggttgccgagatgtactccggtctcggggtttccgcgctggcaaacgcagccggcgtgctcagctcgaatgtcagccagattggcaacgaggtggtcagcaattcgcagagcatcacccaactccggaatgcgctgacgcagacagacgcgaacgtggccagcaaagcggatcagacggcgatgaactcgctaaccggacgagtggagaagacggaatccgggctgacggctgctaacgccaacattacctcgctgaaatccgctgtacgggccggaaacgcatcaggcggagatttaattcccaacccgacatttgacccggcttacgaccagatggggtttagcgtcgtatccacgacggctgaggaggtccctcctagctgcccgtatggttatgcggccagaattgccagccgggatcaccatcctaactttgccgcgttcccggccacgcttaacgatgtgattgagatcagcgcactggttgcctgcggcgccggcacggcgaattttaatctgtatgttggcaccgccgttcggccagatacgagcaccggtgcgccactcatggcggggggcggaaaatcaccttccgcgacctggcagagaaccacctggcgcttcaaggtcacgcaggcgatggtagacaggggttatatccgcccgttcctgcagatctcgcagaacagcccgtatggcaccgtatggttcgttacggactggcatatgcgaaatgtgacagcggcgcaaaaggttcaggatactgcggatgccacggcggcggcggttgactcgctgaccaccaccgtgacgcaacagggtaatctgctgacctcgaccggcaaccggacaacccagctggaaaacgggctggccaccaccaatgccgcagtggccaaaaaggctgatgcgacagcggtgcaggatttgaccaataccgtcacacagctgggcaacgatctgactgctgcgaacagcgccatcacgaaactgaccggaaatctggcgaataccgataaagcgctggcgcagaaagccgatgcgactgcgctggccacgctcgacacgaaagtgacgcagcagggtaaaacgctggagagccagagcaattcgctgacgaatctgtcgaacagtctctcgcaagttgcggcagatatcgatgccagcggtcagataccgggtaacctggtcgtgaatccctcatttgaacgcgggctggatggttataccgggcggtcaaccgcgaccagtgtggtggaggtttccgctcctcacagcgggacgcgggcgctgaaggttgatccggggagcgtgtctccggggcaatacatcccgtttgttcaggggcgaacctatgaaatcggggtgtgggtcaaggaacccggagcgacgacggataatggcgcggggaacaacaagttgcggatcggtaactctgccggccagccggtctttgagcgtccgtacaacagcggcacggtggggacaaactggaccctggtttccggtcgctggaaagcgacggagacagccagcctgccggtgacgctgagcaactatctgattagtggcagccgctacttcgatgatttttacgtcactgacgttaccgaccgggtggacatcgatgccaccgccggcgccgttaccggactgacgagccgggtcagcacagcggaaggggctatcacctcgcaaagccagcagctgacgaacctgcagaacagcctgaacacgaccaacagcaatgtgtcgaagaaggccgatgcaacggcactgacttcggtcgataaccgggtgacagaggcggaagggaaactgaccacacagagccagcagctgacaaatctggcgaatgtgctgacggccacccgcaacgctggcgacaacctgatcccgaactttgattttctacagggcagcactgcctgggatattcagtatccagccggtgtgacttttggcgatttcggggacgggaaagcgggggtccggctgaaccggacgactaacaccagtccggggatcttctccaacaacaacaagccggtgccgctgaatggccagcgcaagtaccgcgtggtggtgaaggccaaaggtgtttccggcgcgatgagtctgctgatccgtcgccagaacaaaatcggccagacggacagtacgtatgaggataaaacggtcacgctgaccactgactggcaaaccatcacctgggaaaccggattgacggctgccggcgcggacgggcagaacttcaaactttattctcatccgacaaacggtgaaatctggctcgattccgtccgggtttttgatatcaccgatgaaaccaacatcaaggcgaccagcgatgctgtttcgtctctgaccgggacggtgacgaaccaggggaacaccctgacatcacaggggcaatccatcacggcgctgaataacgcgctggaaggggtcaaaggcgatgtggcgaagaaggctgatgcgtcggcggtcagttcactgaccaaccgggttacccagactgaaaaggatatccgtagccaggccgacagcctgaccaggctgaatacatcgctgaagcaacaggcaacacggggagccaatgtactgccggacggcagttttgaatcctatgccgtcggcgatgttctcagtaatgcccgcgctgttatcaccagtgaagctgcgcacagcgggaccaaaagcctgcgtgttacgcgcagtacggagtacaacccgaacgcgacggataataacgatacccatatcttttctggtatgcaggttcgcgataatgcggtctattacgtggaggcgtgggttaagttgccggctggctcgaccgccgatccgaccgtttatatggtgctaggattttccttccaggattctgccaatggctggtcgtggcctggcctgaacgtgaaagtctccgagttgtcggtggacaactggacaaaggtcagtggctatctgaccaacaaccgaaccgcactgaaacaggcaatggtgaggatctccatcccgaatacaccaaaagttcgcctgggtgacgccttcctgattgatgatctgatcatcactgacgtgaccgatgcgaaagcggcgctcgatgccgccgatgcgaatgcgcaggcgctttccagtctgtccgcgtcagtcacgcagaacgggaagaatattacgtctcagggcagcgcgatcacgaagctgcagtcggatgtgacgcaacttggtaaggatatcagcggcaaggccgatgccagcgcgctgacgaatctgacgacccgcgtgacggctaccgaaggcagcctgaaatcgcagggagacagcctgaccaacctgcagaacagcctgaacacgactaacagcaatgtggcgaagaaggctgatgcaacggcgctgcagagcctgcagaacaccgttgaacagcatggcagggatctgaccacgcaaagcagcgcgctgacgaacctggaaaacaacttttcctccctggccgttggcgggaccaaccttatccgcaatgcggacacactggagggatggagcagccgccacgccacagagacgtatctgggcgaccgcgtggcctacacccggctggcgaaaggtgcatccggttatatccagctggatgaacagacgctggatgttaccgggcgtactgaatttgtattcagcttctatgcgaaaggtgcctataacggacaggaaatggcgagttatttttataacccgtcgaacactaccaccacggaaaccagccagggggttaaaggcggggccggtgacggcaaggcggtcacgaaactgaccaccgcatgggcgcgttactgggtgaaatgggttattcctgccaccagtggcaccaaacggctgattgccgcgcgtctggaaagcgcgacgtctgccgacaaagaagtctggctctgtcgccctcagctggaaaccgggaccgtgatgactgactggtcaccgagtccggatgatgcggccagcggtattaccgcgaacacatcggccattaacagcctcaccagtcgggtgacgaatgccgaggggcaactgaccgcgcagtctcagagcatcacgaatctgcagaacagcctgaacaccaccaacaacaacgtggcacaaaaggccagcgcgcagtcggtgagtgatctcaccagccgggtcaccagtgcggaaggcaaaatcacctcccaggggcaggctatcacgaagctgcagggcgatttgagcagcaccaccgataaggtcaacaccaaagcggatcagacggcgcttaacgcgctgactggccgggtggagaaaaccgaggcaggcctcacggcagccaacagcaacatcgtcagcctgacggcggcggtgaacgccgggaatgctgccggggatgattacatcccaaacccgtcatttgatccggcgtatgaccgcatgggttatgacgtggtggagaccactgctgcaggtgtgccggctgactgcccgttcaggtatgccgtccggctggccgggcgagaccatgtgccaaaaatcaacaacatcgctgtgacgccgggcgacgtttacgaaatgtctgctctggtagcgtgtggtaccggcagcgctgactttaatttctacatcggtcgggccaccactgctactggtggtattggggcgagagcgtccgggggaaacaccaagaccaccaccgcgtggaaacgagccacctggcgctttactgtgccggcagacacgaacttcctgcgaccgttcctgcaggttaatcagagcagcccgttcggcactgtctggtacgctgccgactggcatatgcgtaacgtgacggcggcgaacagtgcgcagaaaaccgcagatgcgaccgcaaaagcggtggattcactgaccaccacggttagccagcagggcgatacgctcagcagcatcggcacgcggaccacctcgctggagaacagcctccggtcgacaaacgatacggtgagtaaaaaggctgacacgacagcggtgacgcagctgcagggcacggtgacgcagcaggggaatgacatcgcggcagccaacagcgcgctgacaaaactcagcagcgatctggccacgacgaatgcgaatgtgaacaaaaaagcggacgcaagcgcgatgaacaccctgcagaaccaggtcactgagcagggcaaaacactcagtgcgcaaggggattctctaacgcaacttagtaacagcctgagccagacggcagcggatattgacgccagcgggaaaatgccgggcaacctcattgtcaacggcagttttgagcgcggcgcggcgggctttaccggctggagcagtaccgcgacggtggccgatttacaggttccgcattcgggtaacaaggcgctgaaaatgtccgccggccagtcgaacctggtcgggcaggaaatcagtatcacgcagggtcgtacctaccgcatgggggtatgggcgaagcaggacccgggaaccacgattaaagatgcgggtaacacgaagtttcgtgtggccgacagcactggcctgctggtcggctcaaactacggaccgtttagttctggctggcaactggtaacgtttgactggaaagccacgaagaccacgacggccagtttccagctgacgaccttcctcagcgcgggggcaatgtatttcgatgatttccatgtcctcgatgttacggatgaaaaggatatcgcagctaatgccggggccatttctcagatgaatacccgcgtcaccgctgctgaaggggctatcaccacccaggcgcagcagctgacgaaactcagcggcgatctggccgtcacgaatgcggcggtcagtaagaaggccgagcaaagcgctgtcaccgggttgaccacccggatgacgtctgccgagggtaaactggattcgcagtcgcagcagctcaccagtctgcagaacagcctgaccacgatgaatactgagctgggtaaaaaggctgacacgtccgcggtgagttcactgaccggtcgcgtaagccaggtggaaaacaccatcaccagccagtcgcagagcatcacgtcgctgaccagcaccatcaataccatccgcactcagggagctaatccgtgggttgacggtacgtttgaaagctacagcgatggccaggtgctgggcgggaacggcacagccgttgtggtggcgtctcagaaattcaccggcaataagagcctgcaggtgagtcgaggagcgaacaataacggcaacagcgataaacagcttgggagctggcagtcagtccgtgaggatgcgaagttccggtttgagttctgggctatgatgccggcggatcaggcgccatcctccgggtggacaacgctggtcggcattaactcactgaatgctgccggtcaaaactcctggcagtcggcggtcactgtcagcgaagccgctcttggtgcgcgtgataagtgggtgaaatttacgggtattgccagtaacaacgggggtgggagaacacgcgcagtggtctggatctctacccgtggcgcctccggcagcggcacccccggttattcgctgtatatcgacgatctggttatcacggatgttaccgatgcgaaagctgcacaggatgcctctgacgcgacggcgagtgccgtgagcggtctgacggctcgcgtaacggatgctgaagggaaaatcaccgcccaggcgcagcagcagacggcactggccacgaaagtggataatgccaactcccgcgtcgataacatggcgaagacgctaagcgacagccagagcacacaggccagcctgaatacctcgcttcagtcgcagattgacgcgcaggcggccgccaacatcaaaaaccagacgacgctggacaacacgattaaatcggtgaccagtatcaccagtacccagcagacgcatgcaacggcactggaggcgctggcaacgcagcagacgaccctgacatccagtgtcggggatctcagcgcttccgttcagaacaccgccaaaaccgtggcggatgtgaatggtacggtgagttcgctgtggtcgatgaaggttgagacggttaacgggaagaatgttggcgcggggattacgctgggcagcaatggtgaaacgagcgacatgatcctctacgctgaccgcttctcgctgtttaaccgtaataatgcgacggctgttccggtgatggttgccgaaggcaatgagctgtatatcgatacggcacgtatcaaaaacagttccctgacctcaaccaaaatcgcggacggttccatcacgaacgcgaagatcggcaacgagatccgctcgaatgactttgttgacgggtcacgcggctggcgtatcgccaaggatggctcttcgcagttcaacaacgtgatcgttcgcggtgcggtttatgcgactgacggctggttccaggggacggtatatgcgagccacatcgagggcgacatcgggtcatttgcgatcaacatcgctcagcaccgcacgcgcaaggtgccgaaggctacatggcagtggtttgagctggcccggttccggcggcagaatttcgaccaggtgatcaatattcgcggtggactcctccagacggatagcatcactatcgacggcggcgcgaaactcagagcggggatgtcctacgcgccaggggctgacggcggactgaatcctggctatctgtcgtatgcaatgcttcttcgtggcacaggcgctacgtctggtggcggcagtatggagctaggcattgagcttatgtatgaaacaggtggagcaacacgcctgttaacggcgcaagagtcaatgaacgtagacaacatgtcatttgtcgtccctgccggtactggcgacgctgttctgcgatatggctgttacctggaccgtaacggacagatggtattaaccatcctctcaagattcgacgccttcgccgcgcgcaataacaacgtaattcgcggttcatcaacctgataacaatatatggccccgcaaggggccttttctttttccagggaaaaccatccaggaggaactttattatggcgatgtatgaagtcggtaccgtcacgggtgccgcgtcgcaggcacgggtgacaggtgcgacaacaaaatggtcacaggaggcgctggggatactgcccgggtcgattctagtggtctaccgcagcggtagtgctgacctgtatgcgatcaaatccgtggacagcgacacgcaactgacgctgacccggaatatcaccaccgcattttccggtgccagttacggcattattaccgctgaaaccgccagcacctcgtcgtttgctaaccagctggccagcgcgtttgcattctggcgtagtgtagtggagggctggtcgatggccctgaccggcagcggcaatatcaccctgactgacccgatcacaggaaagcaggtgaccgtgccggcgatagccgggatggcgaaggcctcggatcttaacgcgctggcaaaactcaccggaggaaacaaactcgacggctcgcaggttataaccagcgataatgccggttttatactcggtaagaactcagatctggctctgctcaaaaaacaggggcaaggcgggacaattgccgttggctcgggaacaccgtttagggttcagcgttcaagagcgaccactgtatcaccggcagacacctttgatgacatcctcgttattggcaccaataaccagacgacgttgcccggagatttggttgtcggtggtggtttcgataatacggcaaagggcaagctgtattcccaggcgttagagctatcgatgagcacgccatacatcgactttcatttcaacggcagcatcgccgactttaccgcccgcattatccaggaccggcaaaacagactaaatattcagggcaatgccagcttgttagttaccgatggcaatttaaccgctggctcaacaatgcccggcaatatcgcagtcggccagcaggtcaccgccgcacctgtgcggtctcagatgttgagaagaggcgcttacggcgacccggacggcgcatacgtgcaaatgtacatggaggagaaggtcggcactgagcaccggatcgtgctgtactctgacggtttcggaagaaccgatgcctggctatttcggcctggcggcacaatcaccaccggcaaaggtgacgtcatgactaccggttctgacgttcgtctgaaagacgggtttacagaacctcaggaaggggcctccaggcgcattaatgcgctgggggtatgcgagttcaatatgaaaggcgaaacgcgccggaggcgtggttttatcgctcagcaggctgaaaaagctgatgacctgtatactttcctcggcatcgagcaggagatcgatggcgaaaaattcagggtgatgaatgttgattacacggccatcatcgccgatttggtaacagtggtgcaggatttgattaggcgagttgacgcactagaaagttgaggagcataaaaaatcccccggaggcacttgccgggggcaactgtaacgacattaattgctgtgtacatcacagaataatttggagtaaacgataagtaagttcaagtaaatttttactggtcagatgttgtgtcgttgtttaataatctaccaaaattaataatgcaatagtgataaatcctgttgggttttcatgtttaaggatataaccctaaagtattgcctttcattagatttaaaacgtacagatagattcaagaaaatggatgcaaaatgttattattgatacgtttatcaataattgaagtgcaatcttgtaattttcacatccatgttataactttgtaatgcagggcggttttatcttgtaatttagtggtttaaagtgatagcggctcttagtgatttataataggctttctatgttaacaaaattcccagatgaaaaatacatatctgacagaaattcatcgtttattaaaagagtatatttcttacgtcagataggtgtcgttctttgctttcttcctatatattcagtcctccaggaacagtcacatcaaaaaataacgatagccctgttaattttgaatgcactcatctggccatcggttgcttatctggcaagcatgatgtcgaaggatatgctgagtactgaaaaaaagaatatggtactcgattcattctgggctggtatctggatagccgtaatgcaagctagcccaattccatcattattcataatctccgttcaaatagctgatcgctatgctgctggtggatggaaaattttaaaaccagcattaacgtggatgatgattagtttcgtgatagtttggttagcaaatgatttcagatatactatagaattcagcacccgaacggtattgctttctttaccgttggcaacctgttatcccatagtgttgagtgttgtttcaaggcacttatctataaagttgaggaaaagaagggagttactggaaaaacaggcgctgatggatcctagcttagatctgccaaatcgccgattttttgagcaaaaaatggaaagtgcttttcgtgcgacgcgtaaaaagagaattcattcttatcttatgctcattgatgttgataattttaaaaaaattaatgatacatatggtcatgaagtaggtgatgcggtgttatctcgtatatcaacaatattacgagagtgcgctggcgagaaggatgtgccagcaagatttggtggcgatgagttggctattattgttaacaacagtaatagcaagcttgttatagccatggttgatataattcaggaaaaaattaaagatctttcattgccttctcataaagatatgtactgtactgtcagtatcggtatttcttgtgcagaaaataaagaatcaattatcgagtggatcaaagaggctgatcaaatgctatatgaagttaaacgtaatgggaagaatggatattgcatgccgaataattgaagatgaaatgatttattttcttatgatgttatacctataaatgtttaagatggtttattatcggcattatcatcgcagataaatttcttcggaacctcagacaccttctcaactaacgtttgatatctggcactaaattattagtatttaataacacattgattttattgtgatttataatgaaatcatgtttctatttttacctttcacttcacttcatttgatttgaattaccgatcaatttgtggtgtgtgataggtttcgcctattgttcgatcatgatcgatcattttaaactatttctctttcatttataattatgacacgattaggaatattcttagttccggtgtttttttatgttaaagaacagtgtggaaatagaatcctgcaggtttgttttagaaccatcttacaaaaaagatggttctattcattcttgggaaattctcacgaaaagtgttaaaaaaaagaacgctaatgattatcatgctaatgaaggtcttttttgcttcagttcgctaagcgataaagaaaaaatcgatgtgtttaagagacagatattgacaattgaaaagcttgatgcatcaaaattgaagttcaagccagtttcgttgaatgttgacagtcttattagcgattgtattttgaacgataaatatattggtgattacttaaaaaaccaaaaaaacattgcttttgagattaacgagtattttcatgaattcaatactaaatgctgtatggttgacttaaagtgtctttcaaaattgtgtccagtatggctggatgattttggaaggggcttaacaagtttaacaattattgatatgtttaattttgaatgtataaaaattgataaagattatttctgggaaatacagagtgagagcgaattctttaaaagaataaataaaataaaatcatactgcaatttcgtgattgttgagggagttgagacaatagaacaaaaaaataaagtacattctgttgttgattgcgcttgccagggaaggttgtggatgagtgattactattatgttgagatttaaaataaatgacaacaaaagatgataaatgtccattttgtggtgcagttttaattaatgaggaccactgccacagctgccatgcatttaagattaaaggctatgtatcaagagacgcacgcaagacaattaatttgatatctatctgcacatctttactggtagcgctctttgggatcttggttgtgtttctggtatctttcggtatcgggacatatattgctatcattgcgttttctcttattttatattttattatgaaaaggatcctgcatataaaagaagaacaaaaagggaagatggtttggaaaagagcaatcattacatggtaggtagtaattaaataatataatggcgctgcttgttccaatgcaagcctcggattccgaggcttttttattttcttttcaaatcatgagttataacaccggagatatttaacccgactcacagggagtaagtattattggctaataattcactatccagatgagctgaaaaactcaaagccagttatcaaaactgaaaatatactaatgaatttcaataggttagggcttaggttaaacacattaataacgtatcaaaaatacctatttttctatttaaatcaacaagtaatgatgttattggttaactactgctgcgccacctgcagtggttcgaagcggcagacctgatcgttaaaggcaccgaaggcgcaatcgccgctaagaccgtgacctatgactttgaacgtctgatggaaggcgctaagctgctgaaatgttcagagtttggcgacgcgattatcgcgaacatgtaatccagtctctgggttaaacaaaaacgggagccgatgggttcccgtttttttattctccggggggaatcgcgtccgttacgcgggtctaaaaggaggggtatagcggtctctcgtccagttttacgcggtggtgtgactgtcgactcaatccgccttcaacatcccaaagctcacaattctcgaccgccccagctcttttgcccggtagagcgcagcgtcagccgcgcgcagcaggctatcgctttgcgtatgctgcgggtagctggcgatgccgatggacacatcgacctgaccaatttcagccaggccatagcgtagcgtcagcagttggacgctgtgatagatgtcggtcgcgcaggccatcgcggcctcttcatcggttccgcccagcaataccaggaactcttcgccgccatagcggaaggccatcccaatatcgcgcaccgcacgttgaataatcgccgcgacgtttttaatgaccagatcgcccgcttcgtgaccataactatcattaatcgccttaaagtgatcgatatcgatcatcaggcagctcagcggcgtaccgttgcgtaccgccagactcatttgagtatgcagagcgtcatccaggtggtggcggttacgcaggccggttaatgaatcaaacagcgccttttccagcagcgcgttgcgtaaacgctggttcgccagcgccagacccagggcttcggccatcagttcaagataggcgcgggacggggcggtcgcggaggtgacgttgctgaaggagagcagaccaatcgcttctccttgcgcaatcagcggcacgcatagcgaccgttgagcctgcgattccgacaggtgatagcaggcgatatccggctcaccgttgaccggcggatggctcagcccgcgccgcacggcccagcagttatccggatggaagacgtcggcttcaagcggcggagaaagccactgcgccacgcagcgcatctgccagggatcggtatcgagaatatacagccggcccgggatctccggggcgatatttggcgcgaacagttcggcaaccttgatcacatcctcgaacgattcgcagccctgcaagcgctgggtcatcctcgccagcagctcccggaccgcccagtccgcatcgcgctcttgttccagccgctgccgcgccagcccgttctcgcgaaagatgcgaatggcctgggccatatcgccaatttcatcaatctgggtaaactgcggcgtctcaaccgcataatcctgcgatgccagccgctgcaccacgtcgctcaggcgaacgacgggatagagcacccgccgcttaagaataaaccccagcacaaacaggaacattagcgcggtgagcccaaccatgatctcagaaagcgtacgccagatccgtgacttctccgtagcctcggcaatggttttattcacccggccttcgagcatcaggcgaaagtgatcgagctgcgtctggacccgctcgagctcctgctcataggcagcgccgtaaagcaggctgaccgccgctttttcttctcccctggcaacctgcgccagcgccgtttgctgctcatcctgaagttcatcggctatctgtaaaccctcgcgcagcagcgccagctcttcagcggttgcgccattgtctttcagcttttccagacgatgttcaatggcggcggtggcctgggcttgctgccggtactcctgcagcacatcctgatttttttgaatgatgtaaagtcgcgcgagatcggaaagctcccaggcgccgctttctacttcttcgcttagctggtcaaacgcctggcgttgttcgacggcgcggcgttcggcattatccgcacttgaggccatcagcatggcgatgcctgaggcgagggtcagggcgacggtgatcccgtaggcccagttagtcatggtggcgattctcaccggatattccttgcgtgcagatgaattaattatttttttatcgtcacactccggcttcaccggaaaaaaagcggtgattacgggtgcagcgtgtgagtaataatagcgtgcagcgcttcggcatggtgatgcaaaatgcggtacacgtctttatccagcgcgccatttataacatcactctctatcagctgtaacgcttgctgacggctcattccggggcgataggggcggtcttcggtaagcgcggtgaaaatatccgcgatggcgataatccgatccgggagctgcaggtaatgctcattgagatgaagcggatagccgctgccatccagcttttcatgatgattcgcggcccagttaattatttcgccgagttcgctgaaggtgctaagaatttcgccggtcatatagctatgttcccgcacctgaagcagctcttcgtcattcagttcgccctgtttctccaggattttcagcggaatgtgtactttgccaatatcgtgtaaatagccggcaatctcaattttcttacactccatctccggcagattcatataagcggcgagggtgcgcgaaattcgcccgaccttcagactatggctggcggtgaagctgctgtaggtatcgacgattttggcaattaacaggcagatatctttcagaccgtcgatatcgatataaacatggttgatagggccgatgatctccagcattcgctgaatatgtccgggattgaggtgcagccaaaaatgctctttttgtgcgagctggcacaaagtctggcacagcggcggatctatcgcctggtaaagcgcgcgaaatttaccaataatcatatcggtttgaaaggttgtcgcgtgcttatcgccagcaagcaggcgttcaaacacgtcggcgaaatagacgatatgctgttcgaggctgcctttgtggtgtgggctaaaatggtgatcgcggataatcggcaggatgggggccagggtcgctaacccggccagcatttctgctccccggtgctgatgcggatcgttgaggttatcgatagcgttcagcgaggagaacactcgtttatcgcccagaacgccaatgtcgtgcagcagcgcggcgcaaaagatcgtctgctgctgctgacgcgagagccctgacgcctgcgcaagctccagcgcgatcagcgccgttcgttgcatatgcaggtgtaattcagggttaataatttgtatgacgcgggtggtaagcatcaatgctgattttaaggcgatattatgcatcgtttttctccatcgcattacccgcaccgttttgctctatttcgttgatagcgatgccgacatgacaaaatagattgaataagtccattcgggtttcgcatttttatcctgcccatttttagcgcgtccctgcaccaaagtagcgctccgggcgaagtaaaaatccttttttgtccgatagttaatcatttttaccgagtaaaatacattaaatcctggcaagccgtttgcattctctctgcgcgaatttatttaatatctattttgggatgagtcatgatgaattttagagcattactggcaattacgttactggcgataagcgctttcgcctcgagtgagacgcgtctgccgcatatcgtaatcctcgcgaccggagggacgattgccggttcagcggccagcaatacccagactaccgggtacaaagccggcgcgattggcgtacagacgctgattaatgccgtgcctgagatgagcaaagtcgcacgcgttgacggcgagcaggtcgctaatatcggcagcgaaaatatgaccagcgacatcattctcaaactgtcaaagcgcgtcaatgaactgctggcccgcgatgatgtggacggcgttgtgattacccatggtaccgacaccctggacgagacgccttatttcctcaacctgacggtaaaaagcaataagccggtcgttttcacggcggcaatgcgtccggccacggctatcagcgccgacggtccgatgaatctgctggaagcggtgaccgtggcggccgatccggaagcgaagggccgcggcgtaatggtagtgcttaatgaccgcatcggcgcggcgcgttttgtcactaagaccaacgccacgacgctggataccttcaaggcgccggaagagggctatctgggcgttatcgtgagcggcaaaccgcagttcgaaactcgcgtggataaaattcacaccgtgcgttcggtttttgacgtccgcaatcttaacgcgctaccgaaagtggtcattatttatggctatcaggatgaccctgaatatatgtatgacgcggcgatcgcgcaccatgccgacgggattatctatgcgggcaccggcgcggggtcggtctccgtacgcagcgcggcggggatcgaaaaggcggaaaaagccggtatcgtggtggttcgcgcctcgcgtaccggcagcggcgtcgtgccggttgatgacggccagcctgggctggtagccgactcgctcaacccggcaaaagcgcgcatcctgctgatgacggcgctgacgcaaacgaaaaatccgcaggtgatccagcagtacttccacacctactgatcaacttcgggtagggcgcagcgcgccttacccgggttatttcaccacgcacatcgggcgctgcgacaccggctccgggtgaatctccgcctccaggtgaaaaatctcccgcagcatctccggcgtcagtaccgtttccgccaggccctgagcctgcacctggcccccttcaagcaccaccagatggtcgcagtagcggctggcctggttcaggtcgtgcagtacggtgaccacggtcttgcccatcgtctgcagctcgcgcatcagcgtcattagcgccacctgatgatgaatatccagccaggtcgttggctcatcgagcagcaccagcggcgtatcctgcgccagcagcagcgccagaaaagcccgctgccgctggccgccggaaagggcggtcagcggtcgttccgccagcgcagcgatgccggttcgttgtagcgcgctgtcgacctgctgtcgatcctgcgcggaaagccgcccccacagcggtagccacggactccggccgtagccgaccagctcgcgtacggtgatgccttccggaacgtgatgctgctgcggcagcagcgccagtcgccgcgctagctgacgggcggagaggcggtttaaggggacatcatcgagccagacctcgccggcgatgggcgtcaggaggcgagagaaacacttcagcagcgttgatttaccgcagccgtttggccccagcagcgcggtaattttcccgcccggtagcgtcagatcgagattgttgataacgcgcttgccgccatagccagcggttagcttttctattcgcagttccatttaacgcattctcacaagaagccagataaaccagggggcgccgataatcgccgtcagcacgcctgccggcagctcaagcggcggatgcagcgttcgcgccagcagatcggcgagcagcagaaccagtccgcccgtgagcgcagagagcggcaataaacggcgatggcggccgccgaagaggcgacgcacaagatgcggcaccacaaggctgataaaggcgacaggaccgcagaccgcgacgccgatcgacgcgagggccaccgccagcgttaagccgtagccgttaagccagcgcacgttgacgccgagcgttcccgcgcgctcatggcctagcgccagcaggtcgagatcgcgactgagggcgaagcttaagggcagcaaaatcgccagcaggggcaggacgatgatgacgaatgcgccgtctctggcccacaggcttccggtcagccacagcagcgcgttattgatctcctgcggccgcgacagtaagaggtagtcggtcacgctggcccagcaggccgacagcgcgatgccggtcagcgccaggcgcattgggcgagaaaaaccggcaagggcgagcggtatcaccatcgccaccattccgccgataaaggccagcagcggcagccacggcaggggcagggacggtaaaaaccacagtgccgccaccgaggtcaggctcgccccgtggttaatgcccagaatgtccggcgaggccagcggattatgcacaataccctgaaccagcgccccggaaaccgccagcgcggcgccgataatcagcgccagcaccacgcgcggcaggcgatattgcataaggacgtagtgatactcgctgtccgcatgccatccgctgagcagcgctcgccacggcagcgggatcgcccccatccgcagcgagaacagggttaacagcgtgagcgcgagccataaaaacacgatgcgttgtttcacccgcgtctcctgaccagccagacaaaacagggcccgcccgccagcgccagcaccgcgcccgcgggcagttcacccggccaggccaacgctctggcgagcatatccgccagcagcataaacagggcgcccagcagggcgctgaccggcaaaaaagtacgatgatcgtgacccgcccaaaaacgcgccagatgcgggaccagcaggccaacaaaggcaatcggtccggcgacgctgacgctggcgccggtaagcagcaacacggccgcgttgataagcaggcgcaggcgcggcaaattcacccccagcgaatgggcggcggtatcgctgacgttaagcagattaagcgcgttggccagcaggaatacgccgggggtaatcagcgcgacaaaagggaaaagctgccagaactcggcccagcgcacgtgggaaacgccgcccgcaagccaggtaagaataccccaggcgcgatcttccgccagcagcagggtcattctggtcaacgccatgcatagcgccgagagagcaataccggcgaggatcaaccgttggcgatcctgctgttgacgccagccgccgccggcgctcatcaccagcagccagcttattccgccgccgcaggcggcaatcagcgccagcgaaaagcccgccagcggtgccggactgaatgcgctggtcagcgccatcgccagcgccgcgccgctattaatgccgagcagtgaaggcgatgccagcgggttatgggtaagcgtttgtaataacgcccccgacattgccagcgaggcgccgagcattaccgccaccaggctgcggggcaggcgcagattaagcaccagcgcctccgcaagcgaaggagactcaggcgccagcagggcgtgaagggcgttgagcggcgaaatcgggatgggcgaatagcagaacaggctcagccagaacaggccgctgagggccagcagcggccatccccagataaaaaacgcgcgacggaacggtttcatggcgtgatatcaaccgcccggtggtggacaattttaaccatatcgctggcaatacgctcggcggcgaagatcccgcgcatccgcgcccagctgttgctgtcgacggcggcgacctgccctttctgctcggcctgcagcattggccacagggagtcctgctgccattttttcacgatactttcactacggtaatgagcgaccagcagccattgcggattcagggccagcagctgttcgaaatttatcgccgccatcggcgcgccgccgctcggcggcggaactttcaggccaagcgccgtcagcacgctgccggtataagtttgcgttgagtgaagattaaactgctgttcgcgggaggtgccaaacagcacgctggcgccagccggcagctgtcgggaaaacgccgccattttttgccgatgcagcgccagacgctgctgcatctccttatccttacccactactttgccgataatcgccgctgactgcaggttctcctcccaggtttcattgcgcgatttcaacagcagcaccggggcaatctgcctcagggcggcgtaaattccggcatggcgactgctatcggcgacgatcagatcgggatgcagcgcgctgatggcctccagtgaaggctgggcgcgggtgcccaccgactgccagggcttcagacgtgcgcgtacgtccgccagaatacgcgatggatcgttgtcatcggccacgcctgtcgggctaacgtcaaccgccgccagcgcgtcgacaaaggagagttcaagcacgacgatacgctgcggcgttttatcaagcgtaaagcgaccgcgctcatcctgtacggtggcggcaaagagcgggcccgccagaaacagcaggctgaaaatacacagacgaacaaggttaaacattattcactccagcttgccggacagggcgcgaatagcgctgtccggcaacgctctatcatcagaacttcattgatccttgcaggtacagcgtgcgcggctgaccggcgtaaagccctttgttgttatcgtcgtacgagcgggtgtaatacgcatggtcgaagatgtttttcacccccagcgcgaggttgagattggccatctgcgggccaaagtcataggccacgcgagcgccccacagcatatagccgggaatgcggccggtgctgccatcggcgctttcggcaacggtattggcgttatcggcaaactggctcgactggaagtcgccgttgaggttaaacgtccagctgccgggcttgtaatcgacaccaaaggtgcctttgtgcttcggcgagaagggaacctggttaccgtaggtatcgcctttctcgcgaatttcagcattgacgtacgcatagctggcgtagacagagagattatcaagcgcgggtgaaagctcgccgagggcgtaacgggtttgcgcttccaggccgctatgacgcgttttaccccgggcggtgaccgtgtcattggtctggttggaatcgtactgattgttgaagttaatcaggaacagccccatctctgcggtcagcgcgccgtcgtcgtagcgggtgccgacttcccaggttcgcgctttttccggttccacattgccgctttgcacagccttgccaatctggctgtactgtacggtgccgaatgagccttctgtgttggcataaagattccagctgtcggtgaggtgataaagaacattcagcgccgggagcggggcgttatagctgacccgttcgcgggtgccgagcagattattgtcctgataagactcaatgtgctcaaagcgcatacctggcgtaatcgtccagttgccgatatccacgcgatcgtcgatataccaggcgtgggcttcggtgccggaacgggtatcgcgatcgtacgggctggcggtgctgggcagctcgccgctggtggtcgcggtgtagtaacgcatctcgtgggtcgattcgttgacgtagcgatagccgacgccgacttcgtgggcggatgggccgatcataaagctttggctgtagcgcggctcgatgccgcggacccaatattcgcgcggggagagggtaatgcgcttaccctgttccaggtagccgctgcgcagggtatgggtatagaacccctgaatattaaatttatgctgcgcatccggctggtactggtagccgaggctggcgagctggcggcgcccccaaaagcggtcataaggacgcgtggactgccagcggtcggcgttgtagtcggcgcgggagaggccgccgggcatatcggcttcgccgtcatagtattgcagcaggctgttaaaggtatggacttcgttgggcgcgtatttgcttttcagcatcacatcatcaatccgcgtggcgctgtgttcgcgccagtcgctgccccgggtgccggagtaaagcagggcggatccgaaaccgttgtccgccgtgccgccgatcgcgaggttatgcgtctctttcgggttgttttgcgaagaggtggggctgagctgcccttcaatgccgccctgaatgccaaaatcctcggggatggcgcgggtgacgaagttcaccacgccgccgacgctctgcggcccgtagcgcaccgcgccgccgccgcgcacgacatcgatggcgtccatattgccgagcgagaccggcgccagcgaaagctgcggctggccgtagggggcaaagggaaccgggataccgtccatcagcaccgtggaacggctggcaagccgcgggttgaggccacgaataccgaagttcatcgccaggtcgtgactgccggtgccggtattttccggcgcgttgacgccagggatccggttcagcacttcgcgcatcgtggcggcgccggttttggcgaaatcctcccgacggatcacgtcgcgggcgccggcgtgctcaaagacatcattttcgcgcgcgtcgccaagccagtccccgacgacggtgagggtggattctgcagtgacgggcgcgggatccagctccagggtccagacgttcttgcccagcggcttgagccgtaatccgctgccgttcagcagcctgcgtaaaccctcttcggtttcaaagctgccgtgcaggcccgggctatgcttgccgcgcgtcaggctggcgtcggcggaaagcgtgataccgctgcgggcggcatattggttcagggcgtggtctaactccccggcggtaatatcatactgcgcggcggcgaataccggcgcggcggccagccccgctagcggcagcaggcttaaacggattgccatcaccagaggcatcggtttgcgtaaaacgcgtaaaggcgtcatctcttctccaccatcgtttttggttatattcatcagataagtcgaacgagcaggggaaaagggacaatggagaatgagaattttttcgattttttttctcaggctggaacgagtgtgacccagtagcgggtgacagaccgcaatgtaatcggcagcgtttgcgcgataacctgcagaatggcatcaggatcgcccagcggaaaggtgccgctcaggcgtaaatcggccacggcgggatcgcagcgcagcaccccggagcgatagcgggcgagggtttcgaccacttcgctcagcggggcgtcgcggaaggtcagcacgccccggatccagctatcctcgtcgccgttgagcttaaccagggcggcgaagcgatcgcgggtaaaccacaggctttccccggcgttaacgcgttgggcgctgccggacggtaaaaccacttctacggcatgctgctgtaccgccagccgggtgccgccggcaaactgacggacggtgaattcggtcccgagcgcggtgagagtgccttcccgcgtttggacccggaaaggccgctgccggctgtcgtgagcggtcctgatggcgatttcgccgtagcgtaaatgaaccatgcgctgccgcgcgtcaaaacggacgtcggcggcactttcgctattcagcgtcagcagcgaaccgtcggcaagccgctgcgggcgcggtatccctttcgccgtccggtagtcggcgcggaggccctccgccagctcggactcccagagccgccagctgcctccggccgccagcaaaagcatcagccctttcagcacgtggcgacgcgccagacggctatcgtgaagagcacggctggccagcccgcccggcagttgccccatctgctgacgcaggttttctacctgctgccacgcccactgattttcgttgttttgctcataccactgctgccagcgggcctcctgctgcggactgacgcgcccatcgctgaggaccgcgtaccagtgcgaggcggaacgcagcgcctgacgacgggattcgcttagcgtcggtttcacaggccattctccagacggaacagcaggcagtgctcggtggctttcgcgatatatttcttaaccgaactgacggaaaccgccaggcgactggcgatatcggcgtaggtcagcccttcaagctgcgagagcaaaaacgcttcccgggcttttgtgttaagcccgtccagcatggcatcaatctgctgtaacagttcgagctggctctgccgtagctccggtgagggagagagctctggcggtagctgagagagcatgtcgagccaggcgcgctccagggcgttgcggcggaacaggtcgatcatcacccgtttggcaatcgtgcagagaaaagattttggatcgcgaatcgtcaacagcgactcgccggccataattcggacaaaggtgtcctgcgctacgtcgtcggcgtcatatgcggattgcagcttatgggtaagccattttttcagccagccatgatggtcgctatagagcgaggcaagcgtcagcggagaggcgatggcggaagaaggtgacatagccaggttcaggagagttgatcaatacggtatatgttaatatgagaatggttatcatttcaataaagcgcgacagggataagggccatacagacccatagtaacgataagttattgttaaatattgaatagatttttcccctcattgcatcatttctttccctttcttcttaatgaaaataaaattcattatcattattccctccttaaccttaatgttgtatttataatgcatcttatagggagtgaggagagacaaatgaacgcaagcgaaaaagccggacatacgtttttggcaagcctggggaaaacccgcttacgccccggcggcattgaagccacagagtggctatttcagcaggcgggttttaccgccgacagtaaagttctggaggtagcctgtaatatggggacaacctctattgagctggcgcagcgttttcactgcagcgtttacgccatcgatatggataaagacgcgctggcgaaagcccggcaaaatatcgttcgcgaaggtgtggatcatcgggtgatagtgatggaggcgaatgccgctcggctgccatttgccgatgcaacgtttgatatggtgataaatgaagcgatgctcaccatgtatgcggataaagccaaagagaaactggtggcggaatattttcgcgttcttaagcccggcggtcgtttgctgacgcacgatatcatgtatacgcaggatgcgctgggagaggacacccggcggcagctgcagggggtggtgaaatcccacgtcagcccgctgagcgccgccgcctggcagacgcttttccaacggaccggctttgatgccgtaagcattcatcatggaccgatgtcgctgatgtcgccgcgagggttgatgaaagatgaaggttttaaacaggcgctaaaaattgtcggcaatggcttgttgaagcgcgagaatcgtccgagatttttatctatgttgcgtttttttcaacgtcataaaaggcatttgaactttattgcctgctgttctgttaaagcaacggaggtaaaaagtctgaaatagcccaccggcgatatggataattgtcgataaatattaattattgtcaggaaagtaaaataagctgattcttattttagtcatttcgctgacactcatttttaatatttctattttatgtcagtgaggcttatggaagataaaggaatagcctgtctgcaaacgttgtgaaaaggataacagaaagcagaggctatcccgatctcatctggatgcagccgtacctcgacgcggcttcagctgcggcctgcgggttaccacagcgacgttctggttggaaaagacgcatactttatgttgaatgattagcgcgttaatcattcttgtggtggatatttgaggtttattattcacttttttatttacattttgttacaggtgtgctggtattgtgtttttttctgttgacctctttttttacttgccggagtgaatttaccaggattattattgtctgaactgctacacgtaccgcctaatgacagatgaagggactcgttttttccttaagcgttacctcatgttctaatgtttacaggaaaaaacatgtcttgcgcttttaataaaaaacttcttcatccccgtaattgggggacctggtttggcctgagcgtgctctggctcatcgtccagcttccttatcccgtcttgcatcttatcggtaccagcgccggtcgcgcatcccggcgcttcctgaaacgccgtgagcatatcgccagacgcaatctcgaactttgctttcccaccatgtcgcccgcggcgcgcgaaaagcttatcgagcagaacttcatgtcgctagggatgggtctgattgaaacagggatggcatggttctggagcgatgagcgcgttaagaaatggtttgacgtggaaggcatggtcaatctcaataatgccctgagcgagcaaaaaggcgtgatggtcgttggcgtccactttatgtcgcttgaactgggtggccgtacgatggggctgtgtcgtccgatgatggcgacctaccgtccgcacaatagcccattgatggagtgggtgcagacgcgcggtcgtttgcgctcgaacaaggcgatgattgaccgtcgtaatttatccggtctggtacatgccttaaagtcgggtgaagcggtgtggtttgcgccggatcaggactacggcccgaaggggagcgtatttgctccgttcttctcggtacagcaggcagcaacgaccaacggtacctacgtactctctcgtttgtcgggcgcgaaaatgctcaccatcagcatggtgcgtaaagcggaccgcagaggttatagcctgcacatcagcgacgtcatgagcgactatcctggcgaagataaacaggatgcggcaagctatatcaacaaggttatagagaaagagatcctgcgcgcgccggagcaatacctgtgggttcaccgccgctttaaaacccgtccgcttggcgaaacttcgctctattaagctctccgcactcgcggcgctttcaaaatggtcccggttgcgttaacgtgcgcgggatcatattttttgttgtaagcgaaggagtgcgttgtgttcgctgagtttggtgtattgaattacctgacctatctggtcggcgctatctttatcatcctggttcccggcccgaataccttttttgtcctcaagaccggcatcgcccacggcgttaagaaagggtatctggcggcggcaggcgtgtttattggcgatgcggtgctgatgtttctggcttttgccggcgtcgcgacgctcatcaagactacgccggtgctgttcaatatcgtgcgttacctgggggcgatttatctgctgtggatgggcggcaagatgctctacgcggtgttaacccagcgtgatggtcattcgtctgctgattccgagccgggcagcgcgattctcaaacgttcgctgacccttagcctgacgaatccaaaagcgattcttttttatgtctcattcttcgtgcagtttattgacgtcggcgccaaaacgcccgggctggcgttctttattctggcgctgaccctggagataatcagcttcatctatatgagctttttgatcctctccggctctttcgtcacgcgttacgtgaagacgaaaaagaagctggcgaaaatcggcaacagtatgataggccttgtgtttgtcggttttgccgcccgtctggcgacgctccagtcgtaatcgttgggggccggtacgcgggaccggccctatagtgactgtcactgcctcgtaacaaaatcccttcaattttgattgcattggtgttacatatacagccgattatcgctcagaaaaaagggaacccggatgattctgcagaaactcaccagcaataaaaacagcaagaagttctttttgtcgatcgcggcgatctttgccatcgcgcttatcgtggttgggcgcgccacctttggcggcgtggtgagtgaatacaatatgccgtattcagaatggacgacgtcaatgttcttcctgcagggggcgatggtcacggtttacagcattgtgtttacgctgctgttttccatcccgctgggtttcctctttttaggttccgaccgccgggactaatttcatgcaataaggcgaaccgaagttcgccttattatgtttccacggctatcgccagtctctgtcgtcatgatgatggtggcggtgttgatggtgatagcctgggtcgacaatacatcccgataacagcgtgcaaagcgcgagaatcaacggcaacacgatcggttttttcatttctcacttctccagttaaatccgtgcgcaaaaacgggcatgcgccatcggctgatgaggtgagtgtatgcttttaacttattgagtagatgagataattctgcaatccttgccggaaagacgcgcgaataatcctggatttaccaccagcccaattgcgtacctgccacggcgacgatggcgacaataagcataattatggtgctttttttcattacgctccgcctggtgccgcatagccgccgacaaaaaaccagcccagaaaaaccacggcgacgataaaaatagccaccggaaatagaatacccagtctcattattgagcccctgtaagtgcgagtcgtgtcgactatgatacgggatttcaccgtagattagtcaatatgaaaaaaacgtccctgacggcgagactgcttatcctgatacatcgcctcatcggcggcgcgcagcgccagttcaacgtcgatctgccaggggtcggcttcaatcaccccaaagctggcgccggggtagttaatccggtgttcgccaaggaaatagatccccgccagcgcttgacgtaacgcggcgatatactcctgctggtcggctgaatcgggacccgtaccgacaattaaaaactcatcgccgccgagacggcctacaatatcgccgctgcgcacgcgggcggccaggcgttctccgatctgaatcaaaaagctgtcgccgcacggatggccgaatcgatcgttgattgctttgaaatcatcgagatcgataaaaatcagcagcacgctgcgctgctgttcccgggcctgcgaaaactgcgcggcaagatgcttaaacagcgagcggcgattcggcaaacccgtaagctcgtcggtatacgaatgcatctccagcgcgacgttagccgcccgaagctgctgtaccagcgtctctttctcaacgtaatgggagatgaggttggcaaacagattcatcacctgctcaccctcaatgttatagggctgtcttgcccggctggtggcgcacagcgtgccgaataatgagccgtcggtcaggcgcacgggaatgctgaaaaaggtggcgatccccaaatcctgggcggcgagacacgaacgccagcgctcggcgacatcgttgctaaaaatgcagcggtcgtccagcgcgcgtttgcacagcgagtcgttccacgggacggagaacccttcggggatctgcatttcgctgctgttgtgcgcgtacataatatgctggcgctgcgcgtcgaagtcgatacgagtcaggtaggtagattccattcgggtaaccagctccagcatctcaagcagctgtcgcaccagggtttcgagggagtgttcattagcgagcgtttgcgacacgcgagcgagaataaaatcggacatgagaaatacggctcccgaatgctaatcgtcactaccagcaaatgatgctaaaaaacaatcagcgcagaattaacagagatacacaaaatttaacacatctggggggagaatacctgcatccgcggcgggaaaaaaagccccgtcgggggcgacggggaaaactcattgattatggaatgatctgttctctggtcaattcgagaacagggctactctacgatgcaaaagtgcagctaaaatggagaaaccgtggagattcagggtgaaagaccgttttaaacgattaaggaggggaaatgaaggggatgatagtcatgctgcctctggcgcttgccggatgcgcgcagagtcagccgacgcagcaagcacacccgatagggatggctaacccggcttcggtatactgccagcagctgggagggaaacaggttcctgttcaaagcccgcagggcgtgcgcaccgagtgcaagttacccagtggtgaaacgttagatgaatgggcgctctggcgccgcgatcatccggctaagtcatagcgctttcagccagtcagccagcacctgggcatggttttgccgggtgtttttcgccgcgtagagcagcgtcagcggctgctgcctggcaagcgcggccaggcgctcgccttcatcgcggtgggcttccagctcctggcgatagcgctggctaaagtgggcaaaatcaagcgtctcgccgtgaaaagccttacgcaaatcagtcgatggcgccaggattttgcaccactcatcgtaattcagcgcctctttttttattccgcgcggccacaggcggtctaccagtatccggtagccgtcgctcgcttcctgcgggtcataaacccgtttacattgaatcatcgtcactctccctctgttccatccaggcaagcagctgcggcaactgctgctcggaaaataccgttatcccgtattcgcgaagcagggcggcggcaacgccggcaccgggtttgcgctgtccgttaaaggtaccatcatagataaactgactgccgcaggttgggctgccgtcggtgagcaatgctgcggtacagccttcctcctgcgctgcttttagcgccagccaggcggccagctgatagcgcgcagtgacgtcctggccgtcactttcaacaattttcgcacggttttgcatgacatccgctccctgcgcgccaaggatttccgccggtagcctggggatgggcaatccggcagccagctccgggcagtgggtgaccagccgcccctcgctctgccagcgagacagcgcgttagccagccgggctttatggctaccgttatagcgaacctgaaagcccatcaggcaggcgctaaccaaaattttgtccttcatcatgcatccatagcgatttgtctgccctataccatagcgccagtcagactaaattacccgcgttcagaagcagacaaaataaggattgtgttctgccgttgagatcgctaacctgaggctccttgtgttgcctgatattcgctctgacataaggatcctgctatgaactccctcctgcgtattgccctggttggtgattacaaccctgatgtagttgcccataaagcgattcccctggcgattgatgatgccgccgccgtactggagctgccgctgcgttatgactggctggctaccagcgaaataaagtccgctgacgatctcgctgattacgatgctatctgggtggttcccgccagcccctataaaaacgccgaaggcgcgtttatcgctatacgccacgcgcgggaaaacagcattccattccttggcacctgcggaggattccagcacgcgattatcgaatacgcgcgcaacgttatgggctggcgggatgccgcacatgcggaaaccgataccgaaggccggatggttatcgcgccgcttagctgctcgctggtagaaaagtcggacaacattgaactgcgggccaatacgctgatctctcgcgcctatggccgcgacagtattgaagagggttaccactgcagctacgggattgccgccgattttgcccgcgagctggagcagggcgacctgcgggttacgggctgggatgatgacggtgagattcgggcggtagaaatggtgacgcatccgttctttgtcgccacgctatttcagcacgagcgcaatgcgctggaaggcaggcctgcgccgctggttcacgcgtttttacgcgcggcaagtcagtgagcgaacgcccggcggcggttgccgggcgttgatatcgctagccgttgatctcccgatcgcgaccggccagcgcgccaaatatcgccatcgcaacggaaatcagcgccacggcgatcagcgggatatgccagtcgccgttggcatcatgaatttttcccatcaccggcggtccgcaggcggccagcagatagcccaccgcctgcgccattcccgacagcgcggcggcctggtgcgccgagctggcgcgcagcccgataaaggtcaatcccagaatcatggtcgcgccggaaccgaagccaaagataagcgtccacagcaccgcctgagcgggtaaaaaccataaaccgagcgcgctgactgcgcacatcagggcgaccagcaccgcaatgccgcgctgatctttcagccgatgcagtattaacgggatcgccagccccggcgccgcggtggccaactggagcagcccgtgcagggagcccgcctgcgcttcgctgtagcctatgctttgcaaaatggcgggcagccagccgatgatgacgtagtagaccagcgagttaatcccgagaaacagcgtcacctgccaggccagcgccgagcgccagatcccgcggttgtggatggcgcccgaccccgtcagcggcgcggtgacttgcctgcgcgcctgcggtagccagataaacagcgccagcagcggaaatgccatcagcatcaacagcgcgccgcgccagcccagtccggcgagcgccagcggaacgaccattgccgaacccagcgccgccgcgccccccatggtgagagagtaagcgccggtcattttggcgacgtgctgcgagaagtcacgtttgatcagtccgggcagcagaacgttgcccagggcgatgccgcagccgataatcgcggttccgataaacagcagcgagacgaagggcagggagcgcagacccacgccgaggcaaatcaggatcatcgccagcagcaggctacgttcaatgccgaatcggcgggcgacacctgccgccagcggcgagaccaggccaaaggccagcagcggcagggtggttaacagaccggtttgcgcggtggtaaggccatattcgctgcgaatggcatcaagcagcggcgcggcgccggtaaaggtgacccgcaaggtggtggcgataagcagaataccggcaatcaatagcagattacggcggccggcagaaggtgaaacagaattcatggctatctcaaacaagaatacgtggcgcttaccatagcctgtttgccgcctgtttaaatcaagctaaaatgacagattatcgctaaaatcggacaatatcatgatcggactcggcctggacggctacgacccggacagcggccacgaagcggcggcggcttttcgtattcaggtggtcgcggacgagcagtacattccgcgccatcagcaccgtaaaggtcagctcatcctggcgctgcacggtgcgctgacctgcgaagtggagaacgcgatgtggatggtgcctccgcagtacgcggtgtgggtaccgggacaggtgccgcacagcaatcgcgcgacgccggaggcgcaggtctgctttttatttattgaaccccacgcggcgccgatgccggatttctgctgcacgctaaagatttcgccgctggtgcgcgagcttatcctcgttatggccgagcgcggcagggccgaactcgctaaaccggcaatgaaccgcctggtgcaggtgctgttcgatgaactcccgcagcagccgcaggagcacctgcagctcccggtctccgggcatccaaaaattcgtcagatggtggacatgatggccgtcgacccggcccgctggcaaacgctggcgcagtgggcggcggagtttgccatgagcgaacgcaatctggcgcggctggtggtgcgtgagacgggcttaagctttcgccgctggcgacatcagctgcagctgatcctctccctgcagatgctgatccgcgggcagacggtacagcagacggcgcagagcctgggctatgactcgaccaccgcctttattaccatgtttaaaaagggcctcgggcaaaccccggggcgctatcttgccagcctggctacgacttcccaataaacagcgaaatgatcccggcggcgatcagcgggccgaccgggacgccgcggaagagggcgacgccgagcacggtgccgaccagcagtccggctaccagctgcggctgcgagcccatcagcgccacgccgcgcccgccgagccaggaaacaaaaacccccacggcaatcgccagcaacgatttccagttcacgaaggagtgcagcagcgtagagggcggtagcgtgccgctggcaatgggcgccatcacgccgatggtgagaataataataccgatggtcagcccttgcttttcaatccacggaaagaaggcgttgagcggggtgacgcggacgataattaataccaggattgaaatagctacggtggtgttatggctaataaagccgagcgccgccaggcccagcagtattaacagggtggtgtcgagcatgtgcagaggtccttgccagaatataaaaaagaacagcccgtttactctacgcataatcgcgtaagtaaacaggttttttatcgcagactcgcgatttgaggcatctgcacgatcgattttcacccgcggcacaatccgcgccctggcgcaggagagggaacaatcaggcttcgcgatgaaacgcgatcagttccggacgggcaatacgcagatagtcggcggtatcaaggatgatggacttatcaagctgcccggcgttgaaggcgatttccgggaagcgctcaaacagcagcgggtcggcgaccaggcgtaaagaggggtggaagctgaaagggggaatggcgccaaagacgcaggcggtcagggcgtcaacttccgccggactggccagagaggctttgctgccgccgacgtattcggccagacgggctaaatccgcctgcagatcggcggcaaggatagccagaacgtgctgattaaccccatgtcctttaattttacataccagcgctttcgctccctgacccagcgcggtgccgcggatcttcgacacggcttcacactttccgacggcttcatgttccacgacccggtaacgggcgtggtcgcggttaagcagcgccaacagctgctgatgaatactcacttttactggcgcgttcatgtcgtttttttccttaaaaataaaacctcaagattaatcctctcgccccgggtaagcgtgttttttttgctttttattttcgtacagccgggcatccgcgattttcatgacgtcggccaggctgtcccccggcgccatgctgcaggccccccatgaaaaattaacgcgctggttaatgtcaatttccttcaggtgctggcgaatgcgctcgggtatatttttcgcctcctgttcctcataatcgatcagtatcaggaagaactcatcgccgcccagccggataccgtaatcgcttttacgtatggcggcggaaatggactgggcgagcagcacgatggcgcggtcgccttcatcgtgcccccaggtgtcattaaggtattttagccggtcgcagtccagcgccataaacacgatatttacaccttgctcggtgagcttttgcatacgcgattccagcagcgaggagagaatttttcggttgtacagaccggttaaggaatcactaatgttttctttaaaaacgtcggtatacaggcgaaagtgcatgcgtaccaggtgcagcagaacgccggtagatatcaggtaaaacaaaaatagcttccaggagctcagcagaaaataggacatatccagcgatagcgaaatgtgcaggttttctgcgacctgctggctatggtgggcgtagctgaaaaaatgcgtcttgctgcggtgaacgcggatttcagacgttgagtccgagtccgttaaggtgatgtcgagatagcgccagaccagggggcggtcggtggtatagagcagcttctcaatatcgtgacgagtgacgtctaccatcacaatacccttcagccgatcccgataatagaccggggttaagaacgacaaaatattctgtccggttagcgcgtcagcatagatgctggaaattagcgtacgcccgcgaagtaaaccgttaagactgaactgagtgatgcccagtttactgtcgtgaagaaagttccagttatcaacggggctgctatctatctcaatcggcgaatagaaatacgcgtatttattgtctaaatcgaggtaatagcggaagcgtttatctgatttgaacgttgccgaattcagtgcggcgataatatcgctttgggctatcgcggcatcaaaagcctgcagcgccgggagatcgttaatccacggctcgcacgaaggctgggtggtgctgagcgtaccgtgaagcccggggaaggtatgcccggcgatattgagcccgtatacgttgccattggtctgcacgccagcgcaggcctgtcgggccttttcggccgcgggatgcgtatccagctttcgcgagacctgggagataaccagctgattttgatatttatcgtacagaaaggcggattcgcccttctcgacgatgtagcgcatgtattccgacatatcccgatggctggcgactaattcatacaccagaaatgaagatgtcaggacaaccacccccgcagaaatgaaatgacggagtaatttattctgtaatttcatgatgataatttcgccagcacaattaagacaattctaccatgtgcggcgcagggacgccacgttcggtggcagacagactgtttatctatccagtgccggactcggtcagtatcgcgcggcaatggaaataaatagtttattaaatatgagggcgctaatgaatgttgctgtcgtaaatatcctgcaaaatccatttttcactcattttatcctcaatgaaatatgctgcaatgacgctgctatggctatcctggtgcagctaaaaatgaaataatgttaattatcaagcgaacttttcttatttttaccagtccttagcagggttacaggcagtactattgaaagcggcaatgaggttatgatgatggaaaacgcagcggtgcagggatcccctcgaaagtttaaaaaaataagggcgctaaacaggcgtcgaaattatttttttaagaaaatacgcaatgatctgcgagtctatatcgctaaagcgttctgggatagtcgcgcgcgccgcgaagctgatttaacctccgcgaaaacggtgctgttaatgcgtaatgaaggtgcgatcggcgatgtagttgttgattcagcgctggttaaatgccttcacgaggcgggaatgaccgttgactttctgttgaccaaatccaatagtcaggtcatgcggtataatcctcgcattcgccatatctatgaagccgagaatgtcgactcggcggattatttgcacaaatttacccataacgttcctcagtcagttattactgagcttgcgaataataagtacgatattgtaatcgacccgtcgttgtttgatattccggtacacaggatgctgctgttacgacagataaagcccagagcggtactgggtttcaataagtggccttctattaaacactacagcaagtcttttgattttgactgtgaaaactggcacgtcagtaagaccttttctttcatcgctgattatctccagctggataaaaaatctctgcaatcttatgatctgcatattccgcaggatatcagccagcaggttcgtgattatctggcggcgctcaacgggcgtaacgtggtgattaatatttttgccgggcatcaggaccgcagtatgtcgcaggcgcagctggcaacgcttatcgccaggctgtgcgaggattatccggacgtcaatatcatattgctcgatcatcgcaatgaaatccggattcccctgccggagaaggtctgcgtgaatccgttcaaaacgctgcaccactgcatggcgcttatcgccgaggccgacttagttatctcgccggatacctcggtggtccatatggcggcggcgtggaaaaaaccgcttatcgcggtctacaaagatgtgcggatgaataatcgactctgggcgccggggtacgacaacgcgcggcagattatcgttaaatgcggcaaggtataccagctggagagcttgcccgacctgataatggcggagattgatcccgtcactctgcaacaggcgcgagccgggtaaggcggggtaaaaaaacagccagcgtctgtgctggctgtccggaaaggcttaaccgtccgcttttgaggtctgcttatgaaacagttcacggaaaaccggataaatatcttccgggtcgcgaatatgctgcatagcaaagttttcgaaggttgactgcaggtgttcatattcccgccacagcgtctggtgcgcgcgccgggttatctcgatatagctatagtagcgcaccacgggcaggattttcttcgccagcagttcgtgacacagcggtgaatcgtccgcccagttatcgccatccgaagcctgcgcggcgtagatattccactgcgccgggtcatagcgctctttgaccacttcatccatcagcttcagggcgctggagacaatggtgccgccggtttcctgcgaatagaagaattcgtgctcgtcgacctctttcgcctgcgtatggtggcggatataaaccacatcaacgtttttataggtccggctgaggaacagatacagcaggatgtaaaagcgttttgccatgtcctttgtcgcctggtccatggagccggaaacgtccatcaggcagaacatcacggcctgacttgacggttctggccgtttttcgtagttcttgtaacgcagatcgaaagtgtcaatgaacggcacgcggtcaattttcgcccgcagttcggctatctctttgcgcagccgctcctcttcaagcagctgcgccggttcgcttttgctaatggtgtccaggtcttcttccagcgcgtgcagttcccggcgtttaccggcggtcatcgccgtgcggcgcgccagcgagttttgcagcgagcgaacgacgctgatgttagcgggcacaccgttagcggtatatcccgcgcgatgggttttatattccgtcagctgacgctgctggtttttcttcaggttcggcagggcgagatcttcaaagagcagatcgagatattcgtctttcgaaatctgaaaaacaaactcatcctgaccttctccgtcggcgctggcctggccctgaccgctgcctccaccgcctccgccgccctgagggcgctcaatgcggtcattctgtacgaagtgatcgttacccgggtgtacgcgattgcgcaggccgccgcgcccctgatgaaacatcggttcgttaatatcgtccgttgggatggagacggactctccgctctgaatatcggttaccgagcgcttgtttatggcctcggagatcgactgttttatctgcgctttatagcggcgcagaaagcgctgccggttgacggcgcttttatttttcccgttcaggcgtcggtctatgaaccaggtcatatgccctcctgtactgcatttgccaacttatgccccggccattcaggcgctgaaatatgcctggcgctgaatgtcattgggtcttcgcagttattattagcccggcagccgctgcctgccgggctggtctatcaggatgatttacgtacccgcagataccattcgcacagcaggcgaacctgcttgcgggtatagcctttttccatcatgcggtcgacaaagtcatcgtgttttttctgctcatcggttgacgttttggtgttgaaggaaatcaccggcaacagctcttcggtattggagaacattttcttctcgataaccgtgcgcagtttctcgtagctggtccagtttggattacgcccgctgttgtgcgctctggcgcgcagcacgaagttgactatttcgttacggaagtctttcgggttgctgatcccggcgggcttctcgattttctccagttccgcattcagcgactcgcggtcaaacagctggccggtatccgggtcgcgatactcctgatcctgaatccagaagtcagcgtaggtgacataacggtcaaaaatgttctgcccgtactccgagtaggactcaaggtaggcggtctggatctctttcccgataaactcggcgtatttcgggatcagatagcctttgaggaactcaaggtaacgctcggactgctcctgcgggaactgctcgcgctcgatctgctgctcgaggacgtagaacagatgcaccgggttggcggcgacttcggcatggtcaaagttaaatacccgcgacaggattttgaacgcgaagcgggtagacaggccgttcatcccttcatcaacgccggcataatcgcgatactcctgataggatttcgctttcgggtcggtgtctttcaggctttcgccgtcatagacgcgcatttttgaataaatgctcgagttttccggctctttcaggcgcgacagaatggagaagcgcgacagcgtttccagcgtgctcggcgcacacggcgcatgggtcagctcgctgttgttaagcagtttttcatagatacggatctcttccgagatacgcaggcaataaggcaccttgacgatatacacgcggtcgaggaaggcctcattgtttttgttattacggaaggtcacccattccgattcgttggagtgggcgaggataatcccgttgaacggcagggcggagatcccttcggtaccgttatagttaccttcctgcgtcgcggtcagcagcggatgcagcaccttgataggcgctttaaacatctcgacgaactccatcagcccctggttggcgcggcacagagcgccggagtagccgtaggcgtccgggtcattctgcgcgtagtgttccagtttacggatatcgactttaccgaccagcgccgagatgtcctggttgttttcgtcaccgggctcggttttggcgatggcaatctgcgccaggattgacggccacactttcaccacgcggaatttcgtgatgtcgccgccgaattcatgcagacgcttggccgcccacggcgacataatcgtccccagatagcggtttggaatgccgtactctttttcgaggatttgcgcatcctcctgcgggttaaacagacacagcggatggtcgttgaccgggctgcgctcaccgtttgcgctgagcacatagatagggacgcgctgcatcaaggacttcaggcgttcggcaagcgatgatttaccgccgcccacggggcccagcagatacagaatctgtttcttctcttccagcccctgagcggcgtgttttaagtaagaaacaatttgctcgatggcatcttccataccgtaaaactcttcaaaggccgggtagcgcgcgacgacccggtttgaaaagagacgggatagcctgggttcgagggccgtatcgaccatgaccggctcaccgatggccatcagcaatctttctgctgcgttagcataagcactgcgatcttgccgacagatggtaagaaactcctgcagtgtgaactcttcgtccttggcagcttcatagcgctggcgatagtgatcgaatatattcatggcatgccgtcctttcgtttttagcacaggttgagagccgttcatatgaatagtgggagctcccggaagaggtaagctgcacagcgctctctgaatctccagcaacccttatgccaggttggcgaagtctcgggataacgtgccccgcatttacttcttctaaattaaagcgtagatgcatttggaaaacttgcatggcgcagaaaatcaatttcaatgacttatcaacaactcatccggaaaagcagcgtctcattcccacttcgggtttcgccgcgtcatgacgctgtcattcagctgtcagcgggtggtcatctgatgatgagaatctggtgaattcagtgtaatgactggtaaagaatttgaggcatgacgtatacaacgttaaactgcctgcgctaataatttgacaacaggaatatggatcgtgactaaaatcaaacttctggcacttggtgtgttgattgcgacttcagcatccgccgtacacgctgaagggaagttcactttaggggcgggtgtaggcgtcgttgaacatccgtacaagcaatatgatgctgatgtttacccggtgccggtgattaattacgagagcgataacttctggttccgcggcctgggcggtggtctctacctgtggaatgataccaacgataagctctccgtgaccgcctactggtcgccgatgtactttaagccaggcgacagcgatagcgagcagatgcgccgtctggataaacgtaagtccacggtgatggcagggctttcctacgaacactatacgcagtacggtttcctgcgcaccgcgctgtcgggggacaccctcgataacagcaacggtatcgtgtgggatctggcctggctgtatcgctataccaacggcaacctgacgcttacgccgggtattggcgtggagtggaacagcgacaaccagaacgagtactactacggtgtttcgaagcatgagtcgaatcgcagcggcatgcgcagctacgatccggacagcagctggaacccgtaccttgagctgtcggctaactatcgtttcctcggcgactggagcgtatacggcgtggcgcgctatacccgcctgtctgacgaaattaccgatagcccgatggtggacaaatcctggagcgggctgatttcaaccgggatcacttactccttctgatagtgcgttattacagtgcaatttgtgcatcaaaacagggcgtaaagccctgttttgcattacggtggtgcaatcaaacacaggagcatgtcatggcagaaaggacaatccgttttggcgagcattcagcggttccgctcatagggcaggggacctggttcatgggcgaaaacccggctctgcgcgcgcaggagtctgctgcactacgcgcgggcatcgatcttggcctgacggtgatcgatacggcggaaatgtacgccgacggcggcgccgaagaggttgtcggcgaggccattcgcgggcagcgcgagcgcgtggtgctggtgtctaaagtctatccgtggaacgctggcggtcgcaaaatagccagcgcctgcgaggagagcctgcgccgcctcaataccgactatctggatctctatctgctgcactggcgcggggactattcattgcaggagacggttgcgggcatggacgcgctcgttgcgcaggggaaaattcgtcgctggggcgtatcaaacctcgattacgatgatatgcaggaactctggcaggcgaacggcggcgaacagtgcgcgaccaatcaggtgctctaccatctggcctcccgcggtattgaatatgacctcctgccgtggtgccagcagcagcggctgccggtgatggcatattgtccgctggctcaggccggtcgactgcgcaatggacttttaaatcataccgttgtgaaaaatattgcgcaggagcggggcgtaaccgcggcgcagattctgctggcgtgggtgattagccaccggggcgtaatagcgatcccgaaagcgtcaagcattgagcatgtcaggcaaaatgccgcggtgctggatattgtgctgaacgatgaggagcttgcgcttctggataacgcctacccggcgccggccagaaaaacgccactggatatggtctgaacaagcgtttaagaaaagccccgacttcgcggggcttcagccgtcatccggcagatatggcgcacacgcggttaacccgtgggccaagcttcctggcgttagcgtttcaccacgcggagggtttgcgtcaggcgcgaaggtttctcttcgctggccttctgcgtttcggtcacgcagcaggtttctacacaaacgaaggtcttgtaaccatcatccggcatgtcgcccatgctgacggaaagcgccgggcccgggttccaggccacaacgttgctgttatgatgatgcgtaacgtcgatgttgcggttcagcgcatcgtcatgaatcacgctgcaggtttcggcattcagatagacgcggtcggtacggtcgggaaaagtctctgtgccgttgcttaatacgccttcttccgcatttttcactttatcaatataacggtcgcccagaccgctgaccttcactgccgcaatgtcgccgacgttgaaataggtatgcagggcagacgtggtttcaaattcgccgtgcgcctccagctcaatttcgcaggttttgcccagcttaaagcgcgccagcagggtgaactcgtgcggccagtactggcgggtggcgtcgctgcttttcagtgcaaaggtcagcaccacgccgttgtcgtcttcatcgtgccctttcagggcccacggcaggttgcgggcgaagccgtgggagggcagaccctgcagagcagaaggaccaaaccacggccagcaaatcggcacgccgccgcgcagggcaacgccgtttttaaatggggtgttgccgctgagccacaggacttcttcttcgccagcgggcttccaggagagcaggtgagcgccctggaaagccacggacgctttcacctgcggatggtcaacgacgatcagctccaggtcatcaagctggcggcgggaaagtacaggggtaagctgttcgataaccgggagggcaaaaattttattaatcattacgcaatcctttatcttcagacaaaaaaaagagcgaccgaagtcgctcttacagattactgtctcatcccaacttatttggagatgtgagcaatcaggtccagaaccttgttggagtaaccagtttcgttatcgtaccaggaaaccagtttcacaaagttgtcgttcagagcgatacccgctttggcgtcgaatacggaagtgcagatttcaccgttgaaatcggtggataccacgtcgtcttcggtgtagcccagaacgcctttcattgcgccttcggaagcagctttgattgctttcttaatttcttcataagaagcagctttttccagacgaacggtcaggtcaacaacggatacgttcggagtcggaacgcggaacgccataccggtcagtttgccattcagttctggcagaactttacctacagctttagcagcgccggtagaggacgggatgatgttctgagctgcgccgcggccgccgcgccagtctttgtgagacgggccatcaacggttttctgagtcgcggtggttgcgtgaacggtagtcatcagaccttcgatgatgccgaagttgtcgttgataacttttgccagcggagccaggcagttggtggtgcaggatgcgttggaaacgatgtcctggccttcgtatttgtcaaagttagcgcctttaacaaacatcggagtgttgtctttggacgggccagtcagtacgacttttttcgcgccagcggtgatgtgtttacgagcggtttcgtcggtcaggaagataccggttgcttcagcaacaacgtcaacacccacttcgtcccacttcaggttagccgggtcacgctcagcggtaacacggatttttttaccgttaacgatcagatgaccgtctttcacttcaacggtaccgttgaaacggccgtgagtggagtcatacttcagcatgtaagccatgtagtcagcgtctaacaggtcgttgattgcaacgatctcgatgtcagaacgttcctgagcagcacggaaaacaatgcgaccgatacggccaaaaccgttgatacctactttgatagtcatatattccaccagctatttgttagtgaataaaaggttgcctgtaaaattacaaaaaccttacgcagcgtcaagcggaatcgtgtcaatcattgcgacaaatcaatccagagcatgcctttgcgcggtcgatttatcccactttccctttgagcccaattccatatgggggctgcgcccggaattttaaaggtcactgaagataaaaatgtgatattcatcacaattgtgtggctgccttttggcgtcgcctaagtttagaacaaaagtgcacgcttcattgttaatattttgttagaattgacgtgaaaagttgtcctttcacagcgagaagcaagccaatgtcgaataaaccctcttcggacgagctcaaaaaaaatttgagcgagatgcagttttacgtgacgcagaatcacggtactgaaccgccgttcaccgggcggttgctccacaacaaacgcgatggcgtctaccactgcctggtgtgcgatgccgcgctgtttcactcgcaaaccaagtatgattccggctgcggctggccaagcttttatgagcccgtcagcgatgacgctatccgctaccttaatgattactcccacggtatgcagcgcacggaaattcgctgcggaaactgcgatgctcaccttgggcacgtattcccggatggtccacagcctaccggagagcgtttttgtgttaattcggcctcattaagcttcaccaatgatgaaaacggtgagcaaattaagggttgaaaaaacgattcagcaaattattccaaacggggttggcggaagatggaaattgagcggattattgacggtatgacgccggaagtttatcagcgcctggcgacggcggttgagctgggtaaatggccggacggcgtggcgttgactgacgaacagaaagagaactgtctgcagctggtgatgctctggcaggcgcgatacaacgttgacgcgcagcatatgaccatcgataccaacgggcagatggtgatgaagagtaaacagcagctgaaagttgacttcggcattacgccgcagcctatcgcgacctttaaatcctgaggctgaaaaggcctgcgtcagcccggctaactgcgcgccgggctttgaggtatcacagcgttacttcttgttcatcatcgctttaagatcggcgaaggggttatatttcgcttcgccgacgcttttctgcgcatcttcgccagcgaccaccgtcgagccatacagatcggcttcagtgtattttgagtgctcatgatcgtgacagtacaggcacagcatctcccagttgctaccatcttccgggttattggagtggtcgtggtcaatatggtgtaccgtcagttcacgcaggtttgaatagacaaactctcgcgagcagcgtccgcagacccaggggaagagcttcagcgctttttcgcggtaaccgacttccagacgggcgtagtttttcgggatataagccataatacccatgccttttgttgcaaatgaaaagctgcgccggagccggcgcagcggaatggggttatcataacctattgtgctggcgctgacaccgcgcagatcagcgtttgatccccaatgactcggccagctgtttcgctaactgattctggtcatcggcgccgtactcccagaacatcgcgccacccagccccttgctcttgatgtagtcagccttgatggccaccgagcgcgggttctcatacgaaagcgcaaagagggcttgaccgtcggcggactgcaccgacagccacggtaccttcgcttcatcatcccaatgctgagtaaagcgcttctgcggatcgttgattaacttcgccacgatatcgttatatttcacataggtatctttggtcagatcgacgcccagcgattcgaacagttcaatctgttgagccgcaaagtaggggcgggtggccgggtttttctgcgcgtccggcttgctccagtcaatacccggctcgacggcgcgtttgggtatccggccatagaaaccaatccccaggttcatctggctcgcctttagaccggcggcaaggtagttgttcactataaagtccgcgctgtacttatccgcttctgcgaccgtcggccagcgggttgaatcatacaggttggaattgaagtactgggtaccgtaggccaggtcgtaggtcatcaggttgatgtagtcgagcgatggcgcaatggctttgacgtccacccagctttttgggctctccgcgttggcgcctacggcgatggtcaccagttttttattaccgaccgccgcgcgcagctctttcagcagggcggtaaaattatcgcgatcggccggttggctggcgaccagcccccacgcgccgttgaccggatactcccagtccagatcgatcccatcgagaccgtatttttcaataatcgcctgagcggactgaataaacaccgcccgggtttccttcgtcgccgccgcgccggagaatccgcgcgctccccagccgcctacggaaagcaagactttcaggttcgggttctgctggcgcaagcgggggattttctgtaaatcagcctgcactttcggcgacagccaaatttgatgcagcttgctcggatctttcagggcggcgttggtttcgtctttttcatcgttgtaaaccagaccaaacgagtagttgagatgggtaatctggcgtacgtccagtttatcaatatcgccgcctggaccggcagtgacgtcgccgccgccgttaaagtagccgacggacatcagtgagttagcggaaacaacgctcgcgcagagcaggggtaaagctgccagtaaaggcaaaagtttcatagcggatcctctttgacttaaaagtgacattgaaaagcaaacacgccacggaaatggcgtggcgaaaaaaacagctcgtgcagcctagcatcttccgctgcgcaaaaatgcgaagcggttcacggctgcattagcgaagcggtagtgagacgacgtccttttcttcacttcaatcatctccctcggcgaattttaccgtatttgtgatctgagttgtgaaatgcagatcaatatctgtgttttaaagatttaatattgacctcaaagattctgtggttaagtatggctttcactgatgcaaaatcattaaacaaaggaaaacgcaatgaaagcactggcaagatttggtaaggcctttggcggctataagatgattgatgttccggagccggcgtgcggaccggatgacgtggtgattgaaatcaaagccgccgccatctgcggcgcggatatgaaacactacaacgtggacagcggctccgatgaatttaactccattcgcggtcacgaatttgccggtgcaattgtccgggttggcgaaaaggtcaaggactggaaggtcggccagcgggtggtttctgacaacagcgggcacgtctgcggcgtgtgtccggcctgcgaacagggcgattttctgtgttgtacagaaaaagtgaatttaggcctggacaacaatacctggggcggcggattttcgaaatactgcctggtgccgggggagatcctcaaaattcatcgccacgcgctgtgggaaatcccgccgggcgttgattacgaagaagctgcggtgctggatcctatctgtaatgcctataaatcgctcgcccaacaatccaggtttcttcccggtcaggacgtggtggttttcggtaccggtccattagggctatttgccgtacagatggcgcgcattatgggggccgttaatatcgtgatggtcggtctggaagaggacgtcgcggtgcgtttccctgttgccaaagcgctcggggcaacggcggtcgtcaacggttcatccgaagatgtggtcgctcgctgccaggcaatctgcggcaaagataatctggggctggttatcgaatgttccggcgccaatatcgctctcaaacaatccattgaaatgctgcgccccaacggtgaagtggtgcgcgtaggtatggacttcaaagcgctggacttctccatcaacgatatcaccgcgtggaacaaaagcatcatcgggcatatggcctatgactctacgtcctggcgcaacgccattcgcctgctcgccagcggcgctatcaaagtcaaaccaatgatcacgcatcgcattggcctgtcgcaatggcgcgaagggtttgacgccatggtcgataaaaccgccatcaaagtcatcatgacttacgactttgatgaataaccccgtgataaaaggaacgttatccgatggaacagatagcaaaaccgcactgcggcgccaggctggatcgcctgcctgactgccgctggcactcttcgatgtttgccatggtcgctttcggattactggtctgctggagtaatgccgttggtggattaattctcgcgcagttaaaagagctcggctggaccgacaattcgactaccgccacgttctccgccattaccacggcaggtatgtttcttggcgcgctcggcggcggcatcattggcgataaaattgggcgtaaaaacgcgtttattttgtatgaagcgattcatattatcgccatggtcatcggggcgttttccccgaatatgagcttccttattgcctgtcgttttgtcatgggcgtgggattaggcgcgctgctggtgaccttatttgccggtttcaccgaatatatgcccggcagaaatcgcggaacatggtccagtcgggtctcgtttatcggtaactggtcttatccgctctgttcgctgatcgcgatggtattaacgccgctaattagcgcggaatggaactggcgcgtgcagctgttgatcccggccgcgttgtcgctgattgctaccgtgattgcctggcgcagtttccctgagtccccccgctggctggagtctcgcgggcgctatgcggaagctgaggagataatgcgggccattgaagggcgggtggctcggcagacgggcaagtcgctgccgccggtagttatcgatgatgacggcaaaccgccgcgcgccgttccttattcggccttattaacgggggcattgctgaaacgggttattttaggctccttcgtgctgatagccatgaacgtcgtccagtacaccttaattaactggctaccgacgatatttatgacccagggtattaatctgaaagactctattgtcttaaataccatgagtatgttcggcgcgccgttcgggatttttatcgccatgctggtgatggataaaattcccagaaagacgatgggtgtaggtctgttagtgttaattgccgcgctgggatatatctattcgctgcaaaccagcatgctgctgattacgttaattggcttcttcctgattacgtttgtctatatgtacgtctgttacgcctcggcggtttatgttccggaaatatggccgactgaagcgaagcttcgcgggtcgggtctcgcgaacgcggtggggcgaatcagcggtatcgccgcgccttatgcggtggcggtactgcttaacggctatggcgtaaccggggtgtttgtgctgctgggggccgtctccattattgtcgctatcgctattgcaaccatcggaattgaaactaaaggcgtctctgtcgaaagtctcggtattgatgcagttaccagcaaataatattgacgggcaataaaatgaaaaattcaaaagcgatattaaaaacaccgggcacgatgaaaattatcgctgccgatatcccggtacccaaagaacatgaagtgctgatcaaaattgaatacgtcggaatttgtggttcagatgtccacggttttgagtcggggccctttattccgccgaaagaccctaatcaggaaattggtctgggacacgaatgtgccggtacggtggtggccgtaggcaaaagcgtgagcaaatttaagccgggcgaccgggtgaatattgaacccggcgtgccgtgcggccactgtcgctactgcctggagggaaaatacaatatctgtcccgacgtcgactttatggccacgcagccaaattatcgcggtgcgctaacccactatctatgccatccggagagcttcacttacaaactgcccgataacatggacacccttgaaggcgctttggtggagcctgcggcggttggcatgcatgccgcaatgctggcgaacgtcaagccgggcaagaaaatcgtcatacttggcgcaggctgtattggcttaatgaccctgcaggcatgcctttgcctgggggcaaccgacatcgcggtggttgatgtgctggaaaaacgccttgccatggccgaacagctcggagccaaagtcgttatcaacggcgcgaaagaggacaccgttgggcgctgccagcagttctccggcgatatgggggccgatgttgtttttgaaacggccgggtcggccatcaccgttaagcaggctccttacctggtgatgcgcggaggaaaaatcatgatcgtcggtacggttcccggtgattcagccatcaatttcctcaaaattaaccgtgaggtctcgattcagaccgtcttccgctatgccaaccgctatccggtcaccatagaagcgatctcctccgggcgtttcgatgtgaaatcgatggtgacgcatatttatgattttgaggatgttcagcgcgcgtttgatgaatccgttaataacaaacgcgagattattaaaggcgttattaaagttaaccattaatgtattgcaaagggagaaacaaccatgctggcagatattaaatattgggaaagcgatgctcagaataaacattatgcgattgcccactttaacgtgtggaatgcggaaatgctgatgggagttattgatgcagcggaagaggctaagtcgccggtgattatctctttcggtaccggatttgtgggcaatacctcgtttgaagatttttcgcatatgatggtttcgatggccaaaaaggcgtcggttccggtgattgctcactgggaccacgggcgcagcatggagataatccacaacgcctgggtccacggcatgaattcgctgatgcgcgacgcttcagcctttgattttgaagagaacattcgcctgaccaaagaggcggtggatttcttccatccgctgggtattccggttgaggcggagctggggcatgtggggaatgaaacggtctacgaagaagcgctggcggactatcactataccgacccggatcaggcggcggagttcgtcgagcgtaccggctgcgattcgctggcggtggcgattggcaaccagcacggcgtctatacctcagaaccgaaattgaattttgatgtagtgaaacgtgtgcgcgaggcggtatccgttccgctggtgctacacggcgcgtccggcattagcgacgcggatattaagcaggccatatcgttaggtatttcgaagattaacatccataccgaactgtgccaggcggcgatggcggcggtacaggagaaccacaatcagccgttcctgcacgtagaacgtgaagttcgcaaagcggtgaaagcgcgcgcgctggagaagatcaaactgtttggttctgacgggaaagcggaatgacaatatggataatatcgaggttatttgtctgggcgcggctatcgtagatattcctctgcagccggtgagtaaaaatatctttgatgtcgactcttatccgttagaacgtatcgccatgaccaccgggggagatgccattaatgaggccactattatttcccgactcggtcaccgaacagcattaattagccggatagggaacgacgctgcaggacattttattcttgaacactgcagccgggagaatattgatatccatagcctgaagcaggatagcgaaatcgatacctcaatcaacgtgggcttagtcaccgccgatggcgagcgtacttttgtgactaaccgcaacgggagcctgtggaagctgaatattaacgatgttgattttgaccgcttctctcaggcaacgctgctgtcgctggcgagcatttttaatagcccgctgctcgacggcaaagcgttaacggagatcttcattcaggccaaagcgcatgggttaattatttgcgccgatatgattaagccgcggcttaacgaaacccttgaggatattcgtgaggcgctgagctacgtcgattatctgtttcccaattttgccgaggcaaaactgctcaccggcgaagagacgctggatgagattgccgactgtttcctgagctgcggtgtaaaaacggtcgtcatcaagaccggcaagagaggctgctttattaagcgtgccgatatgaaaatggaggttccggcggtttctggcattaccgccatcgacaccattggcgcgggggacaattttgcctcgggatttatctccgcgctgctggaaggcaaaccgctgcgcgactgcgcgctgtttgctaacgcaacggccgcgatctcggtgcttagcgtaggcgccaccacgggcgtgaagaacagaaagctggttgaacaacttctcgacgaatacgaagggtaatagcagcagatgaaaatgattcctttaggcagtacggatatgacgctttcccgcatgggattaggcacatgggccattggcggtggcccggcatggaacggcgatctcgacctgcagatatgtatcgataccattgttgaggcgcatcgctgtgggatcaatctgattgataccgcgccgggctacaactttggcaacagcgaagtgattgtcggccaggcgcttgaacagctgccgcgccgtgaagtcgtcgtcgaaaccaaatgcggtatcgtctgggagcggacgggtagcctgtttaacaaggtcggcgatcgccagctgtacaaaaacctgacgcccgagtcgattcgcgaagaggtggaggccagcctgcaaaggctgggtatcgacaccattgatatctatatgacccactggcagtcggtggagccctgctttacgccaattgcggagaccgtcgccacgctgaacgcgctaaagaaagagggcaagattcgcgccatcggcgcggcgaacgtcgatgtcgggcatatcagggagtacctcaaacacggcgagctggatatcgtgcaggccaagtacagcattcttgaccgggcgctggaagccgagctgctgccgctctgtcagcagaacggtattgtggtgcaggtctactcgccgcttgaacaggggctactgaccggcactatcggccgtgattatgttcccggcggcgcgcgtgctaataaggtctggttccagcgggaaaatatgctgcgcgtgattgatatgcttgagcagtggcagccgctgtgcgaaaaataccgctgcaccatccccgcgctggcgctggcgtggattttaaagcaaagcgatttaatcaccttactcagcggcgccacggcgcccgaacaggtgcgtgaaaatattgccgcgctgaccatcgctttgacggatgatgattcattattgatgagacgaatggcggaagcggtggagacaaaataagagcggcatcattgacctctgtttctgtgtaaaagaatattggaatctgctattcggacatgttattttgaaaacaaacatatcctggcagaggccagggggttattactttgcgggaaacagaggtgttatcgtggcggcaaaagacaggattcaggccattaagcaaatggtgacgaacgataagaaagtggcggtttctaatttaagcgcaatttttcaggtcactgaggaaaccatacgccgcgatctggaaaagctcgaagatgaaggttttttgacccgaacgtacggcggtgcggtattaaataccagtgctttatccgacaatattcatttttataaacgggcaaagtctcattttgaagagaagcaaattattgcccgtaatgccttgccgtttattaaaaataaaaccaccatggctgccgattccagcagtacggcgatggagttattaaagctgctaaaggagagaaacgatctcacgctgttaaccaactcggcggaagcatttcatgagctggcgcagtcggaaataaatgttgtttcgaccggcggagaactgaataagaacacgctgtcgctgcaggggcggatcaccaaggaaattatcagtcgttatcatgtagatattatggtaatgagctgcaaaggcctcgatatgcagagcggggcgcttgactctaacgaagcggaagcggaaatcaagaaaaccatgattcgccaggcagccgaagtagctctgctggtcgatcactccaaattcgatcgtaaagcgttcgtccagctggtggattttagccatattaattaccttatcactaataaggcgcccggtgcacagtggattgctttctgtaaagaaaataatattcaactggtttattaacttcgccgttggtggtgtcgatattgttttcgtttgcacctgggtaatgccataaaaatttaatgatgacggacagcgcggcaaagtgaccctgccgccaacgccatactttataatttagctgaatttgaggcatccagatggaacaatgtgaccctatcggcgcaagattagaccgcttacccttgtcgcgatttcattttcgtatttttgacattattagttttagtttattaatcaccggtttcctaagctattccggtaacgtggtgctggcaaaattagtcagcaacggctggtcaaataattatctcaatgcggcatttacctcggcgctgatgtttggctactttatcggctcgctgaccggcggttttatgggggactatctcggacggcgcaaagcttttcgcgtcaatttactgatcgtcgggatctctgcctgtgcggcaacctttgtgcccaatatgtactggcttatcttattccgctgtctgatgggctgcgggatgggcgcgctgattatggtgggctatgcctcatttaccgaatttattccgcccgcggtgcgcggcaaatggtccgcccgactgtcgtttgtcggcaactggtcgcccatgctgtcggcggccatcggcgttgtagtgattgcttttttaagctggcggatgatgtttctgctcggcggtgcggctatgctgttggcctggtatctgtcggggatgtattttattgaatccccccgctggctggccggcaaggggcaacgacacgcggctgaagaacacctccggcaggtggagtcgcaaatcgagaaagagaaaaacatcacattgccgtcctggcagaatactgccccggtggcggagccgtgcgcggaaagcgactctttctggctgctgtttaaaggtcagatgctgcggcgaacgctggtggcgatcacggtactgatcgccatgaacatttcgctctataccatcacggtgtggatcccaacgattttcgtcaattcggggatcgacgtgacgaaatctatcttgatgaccgcgataatgatggttggggcgccggtggggatatttatcgccgcgctgattatcgaccgttttccgcggcgattatttggctcatttctactgataattattgcggtgctcggctacttctattcgattcaaaccgcagagtgggccatcttaagctatggtctggtgatgatatttttcctgtatatgtacgtctgctttgcttcagcggtatatgtgccggagctgtggccaacgcatctccgtctgcgcggttcaggttttgttaacgcggtaggcagaattgtcgccgtatttaccccttacggcgtcgctatcctgctgacccgctacggcgcgattaccgtatttatggttcttggtttattgctggcgctttgcgcgctgattctgttttgttttggcatcgaaacgcgcaacgcgtcgctggaagagatttccgctctggcctgagataacgcgccgacaggacaatgcctgtcggcgtattttatgcgtgggtttccagccagtcgtcaagggtatagagagttgcgcccgcggcggccatctccataaacgccagattgctatcctgcggctgaatattcaccccgcggcagccgtcggtaatcacgttgacggtgtagcccagattgagggcgtcaagcacggtaaacttgacgcagtagtcggtggcgagccccagcaccgttagctcgctgatgccgcgctcgcgcagccatgcatcgagctgcgttttctgccggtggccgttgtcgaaaaaggcgctgtagctgtcaatggccggattttcccctttgtggaacacggcggcaatatcctgctgtttgagcagcggatgcagcgccgcgccttcgctattctgcacacagtgatccggccagaacgtctgcgccaggccatcaagctcgccctgggtatagggttcgacctgatgctgactggcaaagctgccgtggttcgccgggtgccagtcctggctggcaactaccgtttcgccccgcgccaggctccaggcgataagctggttggcgacgtccaccgtgctgtcgccctgcgggacggctagcgcgccgccggcgcagaaatcattttgtaaatcgaccagtagcagcgcgcgctgggtcatgtgcttctccttactcatcgggtgtcagttcgccgcgcagattctcctgcatggcgtgacggatagccgccacgtccagatcctggctcagcaaatagtgtagcttggtcagcgtggcctcgacggtcatatcaaatccgctaatcacgccagcctgcgccagcgcgttgccggtggcgtagccgcccatgttgaccttgccggacatacactgggtcaaattaatcaccacgataccgcgctggctggcttcggccaggacctgaataaactcgccgttctgcggcgcgttaccgacgccataggagcgcaggatcagcgctttgaccggctggcgcaggaagttgcgcaccacgtcggcggaaatgccgggataaatcgtcaccacgccaatcggctgcggcgtgatagggtgaaccaccagctcgccgctgccgtgcggcgcgggaggcgtgccgagccggcgaatatggataccggcttccagcagcggcgccaggttgggcgaggcgaaggcgttaaaaccgtcggcatgggccttcgtcgtgcggttgccgcggtagaggcgattattgaagaacagcgacacttcgttaatcggatagttggcggcgacgtacagcgcgttgagcaggttaatctggccatcagagcgcagttcggcaagcgggatttgtgaccctgtcacaatgaccggttttcccagattctccagcatgaaggagagcgccgaggcggtaaacgccatggtgtccgtgccgtggaggatcacgaaaccatcgtactggtcataatggtcgcgaatatcgtcggcgatatgctgccagtcttccggcgtcatatcggaagagtccattaacggggcgtattcatgaatggtgaagtccggcatctccgggcggtgaaactcgggcatcaacgccagctggcgctgtaaatggccggaaacggggatatagccgtgttcagaacgctgcataccaatggtgccgccggtataggcaacgtaaatagatttcttctgcatagcatcgcttaggttaaacgtagacaggcgcagtatagaggggcggaagaaaaaataaagtaaatgccgccccacgggatggggcggcagaggattaacgaatattggcgcaggttaagcagaacgcgtagcggttctgcggatcgttgaatgccgccagcttatcgctctcggttttcaccgcattggccgccgcggcgaccggtgcgggcagatacgcctggaccgctgccggcagcgccgcgcgaacggaacccgtcaggctatccaccaccatcgaaaagaaggtcggttcttcctgatagtagttgatatgccactgtttcagcttcgccagttcggcggcttttgccaccgcgtcgtcaaagtcgccaaggctatcgaccaggccgttcgcttttgcatcttcaccggtccagacgtggccctgagcgatttggtcaattttctccggcgtgctcttacgcgcgttcgccaccagggtaataaaacgcttgtagccgttttcgatgctgagctgcatcagctgttgcacttccggaggcagcgctttggtggttgagacatcagccagcggcgaggtggccacgccgtcggtatggacgccaattgagccgagggtatcttcgacggtattgatcaccccaaagataccgatagagccggtaagggtgctggggttggcgacgatataatccgccggggtggagatccagtagccgccggaggctgccatgccgcccattgagaccaccactggtttaccggccgcttttgccgccgccagctcttcgcgaatcatctcggaggcgctgacgctgccgcccgggctgttaacccgcagcacgatcgctttcactttcggatcgaggcgcgcgtcgcggatctgcgcggcggtggtgtcgccgccgacgttacccggcgtttcttcgccatccataatcgcgccgttagcaaagataaccgctattgcggaaccctggtcggcaggcgttttcagcgtgtaatcgtagtagctgatcgcgctgtagttgttgtcctctttactccagccaaactgtttagtcagcgctttttccacctcggtagaggtgcccagcgcatcaaccagcttgttatccagcgcgtattttgccgtgtcgccatcgactttacgcaggccgtcaatcacgccctgagcgccggggaacagctgctgagcggtgatctggcggttggcggcaatggtattgaggtagttttgccacagctcgccaatccagcggctgtccgcctcgcgcgccgccggggacatatcatcgcggataaacggctctaccgctgacttgtaggtgccgacgcggaaaacgtgggtcgacactttgagcttgtcgagcagcgatttgtagtacaggccgttggtcgcgaagccgtgcaggtccacttcgccctgcggcgagagccagatcttattggcgaagctggccagatagtactgaccctggctgtagctgctgccgatggcatataccggcttgccgctatcgcggaattcgcgcagcgctttaccgatatactgcatcgacggctgatcgccgccggcaaagtccttcagatccagcacgataccggtgatattgcggtcgtctttcgcctggcgaattgtctgcacaatgtcgaacagcgagttttcctgcaggcgatcggaactggcgccaaacagctggcggccaatcacgccaagcttgctgctggccgagggtttatcgaccaccacgccggtgatatccagcagcagcgcgccgcgggtagcgtgctctgtcgttgtactactgaactgggcccagatgccgacgcaggccagcaccagcaccaggaaaaccacgttcagtgcgagctggcgaatgaaatttagcacgcgccatgtccatttaaaaaatccggcgagcagtcgccaaagagttcgcatgtattctccctaaccataatcaaaaatgggcgagccgcaggggctgccgcgtctggctatcctaatgagagtgccgtcggttgtcagcaggaatcacccgttgggctgtaacaaaatccttgcgcatgttaattttatgaaaaatcacatcacaggagttatacagatggatgctctcgaactactggttaatcgccgcagcgcttcacgtctgaccgacccggctccggcgggcgaacagctggaaaacatccttcgcgctggcctgcgcgcgccggaccacgggacgctgcagccgtggcgcttcttcattattgtcgatgaagggcgcgagcgcttcagccagctgctggaaaaaggcgcggtggcggcagggggagatgaaaaagcgattgaaaaagcgcgcagcgcgccgtttcgcgcgccgctgatcattgcggtggtggcgcgctgtgaagatcatccgaaggtgccaaagtgggagcaagagatgtcggcgggctgtgcggtgatggccatgcagatggcggccgtggcgcaggggtttaacggcatctggcgcagcggcgcgttaaccgaaagcccggttgtacgcgaagggtttgcctgccgcgagcaggataagatcgtgggctttctctatctggggaccccgcagctcaaagcgtcaaccaccatcgctttgccggataccgcaccgttcgtgacgcgcttctgagtccgttctcgttatgccgggcgggcccggctcaccggctcctccgggggagtagcccggctaagcgcagtgcgagctgggtggaagcagtgccagtctatcagacttgacacttttcccggaggcggtgctggcgcacctgtccgggctatcaaaccgcggacggctgggaacccgtagcccggaaaaagcgcgtcaagcgccgcctccgggaatttaacagcgatgaggttacttctgccgtttcgcgaattcgtctttcgctttctgaagctgctgctggaaggccggattggtatgcagcgtggcgacgaccgccgaaccgacgatacgcgctgcgtctacgtcgctctgccagtgatagccgcagatcacccggctctcgccgagctcaaagccgcgcttaaggatttcattttgccgctggggattaatctcagccagcaccagcgcggtggcccagccgatagaggtgtggccggaggggtaggagccgtttttcgacagcgtatcctgttccttggtgttacaggtggcgacgccataaaacgcaaatgggcgaatgcgcatgtacttctccttcgctcctcgcgtcgccaggtcgccggcatcttcaatcatgttggtgagcagcttgtgcagctccggcgcatctttggcggtaatgggcgagccgaaggcgccggagaaggcgttggcgacgccgccgccgctcaggttggcgtcttcaaccgccagcttaccgcgctcggtgccgcgcagcagacggcctttctcatacatcgcctgatcgtttaaaaacgcgatactgcccacttccggcggcggcggtagcagcgcgaggctgtcgatagcctgggcgttggtcaggtagtagagatcgggttttgtggtgacgtcgttaccggcgggaaccagggcgaaagcgttaagggagaagagactggccaggcaaacggcgagaacacgctttttcatgaaaacttccttacgttgttatatgtccagagaaaacagaatttatgcttgtcatatttctgtcattttttagtaaagggtaaaatcacgttgaaaaagcgggaccgcatcgcaaaatcgcttttttgtctgcttaatgagcaaccatacgcgatttcggactgtcgcacttaccactccgccatttgggcgctaccatatcgggattgcaatgacaggagatgtccatgagcgagcaagccattcgtttaacgcaatacagccacggagccggttgcgggtgtaaaatttcccctaaggtgctggaaactatcctgcaaagcgaccaggccaaatttatcgacccgaatctgctggtgggcaacgaaaccagcgatgatgccgcggtctacgatctcggtaacggcacgtcgatcgtcagtactaccgatttttttatgccgatcgtcgacaacccgttcgactttgggcgcattgcggcgaccaacgccatcagcgatattttcgccatgggcggtaagccgattatggcgatcgctattctcggctggcccatcaataccctggcgccggaaattgcccgtcaggtggttgagggcgggcgctttgcctgccagcaggcggggatcgcgcttgccggcggccactccattgacgctccggaacccatcttcgggcttgccgtgaccggcgtcgtcccgaccgagcgggtgaagaaaaacagcaccgcgcaggccggctgcaagctgtatctcactaaaccgctgggtattggcgtgctgaccaccgcggagaaaaagtcgctgctgaagcctgagcaccaggggctggcgacggaaaccatgtgccagatgaacctcgtcggctcggcgttcgccaacattgacggcgtgaaggcgatgaccgacgtcaccggcttcgggcttctgggccacctgagcgaagtgtgccgcggcgcgggcgtacaggcgcagcttacctatgcggatatcccgaaattgcccggcgtcgaagcctacatcgcggcgggcgcggtgccgggcggtaccgggcgtaactttgccagctacggccatttgatgggcgacatgccgccagcgtggcgcgatctgctgtgcgatccgcaaacctccggcggtctgctgctggcggtaacgccggaagccgaggctgaggtgcaggctgccgccgctgagtttggtatcacgcttaccgctatcggcgagctggttaccgcccgcggcggacgccccatgatcgagatccgttgatttcatgcggctgtttattgcagaaaaaccgagtctcggtcgcgccatcgccgatgtgctgccaaaaccgcatcgcaaaggcgacggctacattgagtgcggtaacgggcaggtggtcacgtggtgcatcggccacctgctggagcaggcccagcccgacgtctacgatgcgcgctatgcgcgctggaacctgctcgacttgcctatcgtgccggaaaagtggcagctgcagcctaaaccgtcggtgaccaaacagcttaacgtgattaagcgtctgctcggcgatgcgcaggaagtcattcatgcgggtgacccggacagagaggggcagctgctggtggatgaggtacttgactacctgcagctggcgccggaaaagcgtcagcaggtgcagcgctgtctgattaacgatcttaacccgcaggcggtggagcgggcgattaaccgcctgcgcgccaacagcgaatttgttccgctgtgcgtctccgcgctggcccgcgcccgcgccgactggctatacgggatcaatatgacccgcgcgtacaccatccttggccgtaacgcgggttaccagggggtactctcggtcgggcgcgtgcaaacgccggtgcttggcctggtggtacgccgcgatgaagagattgaaaacttcgtcgctaaagacttcttcgacgtcaaggcgcatatcgttacccccaaggatgagcgttttgtcgccacctgggtgcccagcgaggcctgtgaaccgtaccaggatgaagaggggcgactgctgcatcgctcgcttgccgagcacgtcgtcaagcgcattgaggggcagccggcgacggtcaccgcttataacgataagcgggactctgagccagcgccgctgccattctccctctcggcgctgcagattgaagccgcgaagcgcttcggctttagcgcgcagaacgtgctggatatctgccagaagctgtacgaaacccataagctgattacctatccgcgttcggatagccgctatctgccggaggagcattttgccgggcgccatgcggtgctgaacgcgatcggcgtgcacgcggcggatctgctgccgcagccggtggtggatccggagatccgtaaccgctgctgggacgataaaaaggtcgatgcccaccacgcgattattccgaccgcccgcagttcgcaggtaaaactcagcgacaacgaagaaaaggtttacggcctgattgcccgccagtatctgatgcagttctgcccggatgcggtgttccgcaaatgccagatcgatctcgatatcgccaacggcaagttcgttgccaaagcgcgttttctggcggaagcgggctggcgaaccctgctgggcaataaagagcgcgatgaagagaacgacggcatgccgctgccggtggtggcaaaggatgacgagctgctgtgcgaaaaaggcgaagtggtggagcgtcagacccagccgccgcgtcattttaccgatgcgacgctgctatcggcgatgaccggtattgcccgctttgtgcaggataaagacctgaagaaaatcctgcgcgcaacggatggcctcggtacggaggcaacccgcgccgggattatcgaactgttgttcaaacgcggcttcttaaccaagaaagggcgctatatccactccaccgacgccgggaaggcgctgttccactctttgcctgaaatggcgacgcgcccggatatgaccgcccactgggaatcgattctgacgcaaatcagcgagaaacagtgccgctatcaggactttatgcagccgctggtcggtaccctgttccagcttatcgaccaggccaggagcacgccggtacgccgcttccgcggaattgtggccccgggcgacggcaagaagagctttagcaaggggaaaggcagagccaaagcgaaagataaaaaaagcgccgccggccctgcggcggaaagtccgcaataaaaaaccccgggaaaccggggtttttcaattatgttccgaacccatatacaggggttcattcagcgagtggacttaaataacaccctgcgccagcattgcgtcggcgaccttcacgaaaccggcgatattcgcgccgcgtacgtagttggtctgcttcgcttcaccgccgtactcaacgcaggcgtggtggatatccagcatgatatggtgcaaacgggcatccactttctccgctttccagcccatacgcgcggcgttctgcgccatttccagacctgaagtggcgacgccgccggcgttggccgctttacccggcgcgaacagcacgcccgcttcgaggaacagatcggtcgccgcgatagtggttggcatgttggcgccttccgcaacggccttcacgccgttggcaatgagctggcgggcagcgtcgacgtccagctcgttctgcgtggcgcacggcagagcgatatccaccggcacggaccacggctgcttgccttcaaggtaggtcaggccgaactcgcgcgcgtaatccgccacgcggccgtggcagcgctctttaatgtcgatcaggcgcgccagtttttctttagtaaagccagactcgtcaaccacggtaccgttggagtcggaagccgtaatcacccgggcgccgagctccatggctttctcaatcgcgtactgcgccacgttgcccgacccggacaccgcgacgcgagccccttcaaagcccaaaccgtggcgcttaagcatcgcttcggtgaagtaaatcagtccgtaacctgtggcttccggacgaatcaggctgccgccgaaggagaggcctttaccggtgaagacgcaggcgctgttgttggagagcttacgcatcattccggccataaagcccacttcacgaccgcccacgccgatatcaccggccggcacgtcggtatccggaccgaggtggcgatacagctcagtcatcagcgactggcagaaacgcatcacttcgccatcgctttttcctttaggatcgaagtcgctgccgcctttaccgccgcccataggcagggtggtgagagcgtttttgaaggtttgttcaaagccgaggaatttcagaatcgacaggtttacagagggatggaaacgcataccgcccttatacgggccgatggcggagttgaactgcacgcgccaggcgcggttaacctgaacctgattgcggtcatcaacccaaacgacgcggaactggatagcacgctccggttcaaccagacgttccagcaaattcatctgacgatagcgcggattttcctcaaggaatggccacagggtggtcatcacctcgcgcaccgcctgagcaaattcagtttgatttggatcgcgctgttgaacgcgggcgagaaaaccttccagagtgcacgtctgatccatagatataagttccccttatggttgtggttgcgtctatttattatgattcggcccttgaaaaagccgattttccgactataccatcggaaatcgttagttaagcaaggaaaaattgttcagaaagcaaaatttataatcaggcggtggtcataatcaaaaacgatgacaaccacccgataaaattagcgggaatggagagcggcgcgctgggcgataaaggcttcgagcaggggaatatcggctggcgcaagagggaaggttaacgcctcctgcggtgaacaccagcgcagctgactgtggtagtgggcgattggttcgccgttaaaatgcggaacccaccaggcgtgaagatgtatcaggcgggcggacacttcgcgctggtggctggcgatgtagcattccggccgggcgtcgatcgccagctcctcccggagctcgcgcgccagcgcctgggcctgggtttcgccgggttcgactttaccgccggccagctcccacattcccggctgatccgcgtggggcggccgctgcgccagcagaatttgcccgttgcgttcgataatggcggcaacaacatcaagggtttttagcatgtgaatcatcgttctgtacgggataatggcctattatcaccgtccttgtccccgtcaaacaaccctgaattcgctggagagactttgtgcttgaccgtcatttgcatccccgcctgaaacctgtcctcaacgccgccgccgccctgctggatcgtccggctatctctcccgatggcctgacgctctttggctttgcgattggcgtgctggcgctgccgtttttagccctgggctggtatccggcggcgctggcggcgatcgtgctcaaccgactgctggatggcctggacggcgcgctggcccggcgacgcggattaaccgatgcgggcggttttctcgatatttctctcgatttcctgttttacgccctggtgccgtttggctttattcttgccgatccggcgcacaacgcgctggcgggcggctggctgctgttcgcgtttatcggtaccggcagcagctttctcgcctttgccgcgctggcggctaagcatcaaatcgataatccgggctacgcccacaaatcgttttattatctcggcgggctgacggaagggacggaaactatcgcgctgtttgtgctgagctgcctgtttccggcgtggtttgcgtggctggcgtggatgtttggcgcactgtgctggctgacgacctttacgcgggtgtggagcggatacctgaccctgaagcaggtaagagattgatgggcgggtttttcccggctgcgcttagccgggctacggggccacagtcgtcagcggtccggtgcgccagcgccgtcttcgggaaatgcgccgggaaggatgcctcccggcggttcatatggccaacaggcgaattacatactgctttccgggccgcgttccccgcgcgagaccgggtttttcgggttgctgctccactcgtaccagccgccgtcgtagaccgagacgttgttccagcccatcgcccgggcgtacataaaggtttctgaggcgcgccagccggtaccgcagtaaaaagagacctgctggttcggcagaatattccatgatttccacatcgcggcgatatcatctgcgctacgcatggtgccgtccggattatggaaatcctccatatgggtggagtcgcttccggcatggccccagcgggccccggcaatctcccccatcggcttgatatagctgtagccgctggtggtgccgataaactccggccaggaacgaatgcttaccagcgaggcgtcctgacggtgcagcagggcgcgagcctgctcggtattgagcatcagctgcggctgacccgggatcggcgcgccgaactccggctcgggcttctgcttcggcggcgttccgcgctcgaccggcagcccggcgtcggaccaggttttccagccgccgtcgagcaggcgtacatccttaaccccggcgtagagcatgatctgcgccacgcgggcggcggcatacacgtcgcgaccgtacaaaatcaccgcggtgtcatggcgaataccgtgttttgccagcatcgctttaagctgcgcgtcggagactttgttccatagcggctcgctctccacctcgttggtatcgatatacccggcgcccggaatatggctcagcagataaaacttcggcgcgccccaggcggcctcgaacaccttccagtgcccggcaggcgcggcggtgaccggtttaccctgctggaggtcgtgcagccactgcggatacaccagctgttcaaaatgcggcagcttctgcaggcggtccgcctggctcagggcgtcgccgagcgagctgaggtgagtgaaaccagccgccttaaggcgcgccgcgactttcgcgttgtcgtcggcgttgccgtacagcgcaatcggcgtagaggcctgcagattgtgcagcttagcccaggcgctcagctgttcatcgttcagcgagccaagccagctggcggcgaggttgagcgcctgcggttcatggccctgagggccgttggcgccttgcggccaaccgttatagaaagcgctaaggcgcgtatcaatagcgacgccgttgtgctgttgcagcgtggcaagcgttagcgttggcatggtgtcagcggcggaggtggaagcagcagcaagccccatcagcagggcgagtgcggtcaattgagaaacacgtttcatcgaaatgcccggcagtagaaaattgagcggcaattctccgcgaacaacgcggagaattctttgcgatagcgcaggctttcattgccagagccccatatgcaaacagcgtccgccggcgggcgtatcctggtcatcatgcgtgaccagcaccgcggggatcgcctgccgcgccagttcgttgaacacccagcggcgaaaatcggcgcgcagcgcaacgtcgaggcggttaaacggctcatccagcagcagcgcccgcggtcgggccagcagggcgcgcagcaggctgacccgcgcccgctggccgccggaaagggtggccggatcgcgcgtataaaaccccgccagaccggcgcgctccagcgcctgttcgacctgggctttgcgctgggggccgcggacgtcagcggcaagcgccaggagtaaattttgcccgacgctgaagtggtcgaacagcagcgcgtcctggaacaggatgccgatgcgccgtcgctcggtgggtaaactgtcgcagcgctggttatccagccacagctcgccggcggcgcgaaaattctccgccagcgcgccgaccatccaggcgaacagggttgatttaccgctgcccgaggggcccatgagggtcagtatctcgccgggagcaacggaaaagtcgacgttgcgcagcagaggctctccgttgaggctgagagtcaggtttttgacgatcaacattagcgtaatccttgtcgatagcggccggtcagccaggccagcagcgcggtggcggcaaaaaacagcgccggcagcagtagctgccatagcgcctgcgcggccagagtggacgtctcgccgccgctgctcagcgcgacggcttcgctggtgagcgtcgggaaccgtccgccccccagccataacgtcggcagatattgcgcgatgcttaccgaaaagcccaccgccagcgcggtcagcagaggacgcgtcagggcgggtaaggtaaccagccagaagatgcggcctcgttgccagccgagggtgcgggcgagcagctccatgcgcgggtcgcgagcgcgccacgcgggacgcagaataaacagcatccacggcacgacccacagcaggtgcccccataaaacggcgacccactcgccgtccagccacgtatacagcgccagctgatattggccgtctaccagcggcagcgccggtaaaatcagcggcagccagatccatccgtcgaaacgggaagggccagacgccagccacagcaggcagataaccgcgccgagcgacgctgagcagagtccaagccacaggctgttgccgacgctatcgctgaccggctggctattctgcgccgccgcggcaagcagcagggcgcaggccacgccgcacagcggcagaagaagggcgaagcttttcccggcgagcgcccgcggctgcgggtggcggatcccctgaacctgcgggatccgccgtcgccagagacgccagactccccacgccgccagcgccatgatggcgagcgtcagcagcagtaccaggctggcgagggcgcctttcgcctgctggatctcatcgccctggcttaaccattgccaggccagcaccgccagcgtcggcgggttacccgggccaatcaccagcgcgacgtcgaccgccgaaaggctccaggcggcggtggccagcagcgctatcgacagcgccggaagcagcgtgggcaagactaaccatttcaggcactgccagcgtccgtagccgaggctttttaataccgtcgcctgtccggccaggcgtttctcgcctaacaggccataaaccacccacagcagaaacgcgctctctttgagcgccatcgtcaggcccagtccaatgccgtagcggtcaaccggcggggtaaaaaagggcaacaggcgcgggagccagccgccatcggcgaagagcagcagggcggcggtggcgaaggccacgtgaggtaccgccagcagcagagggagccttgcggccagccgccgccagccgcccgacggccagagtgcggccacgacggtgagcgtgatgatcagcgcgccgccaaccgatagcagagttgagacgagagtcgccgccagcgcctggctgaattgcgggtcggcaaacagcgacagccagcgcgcgcggcggagcgccggaagcgccatcagcgcagcggccggcagcagcggcagatagatcagcgcgacggcggcccaggccagcagccttagtgcgtgccgtagcggcgcagccattcctgctccagcgcgtcaacccaggccgcgtgcggttcacccagcatcggcggcatattctgcggcacaacggcgttaaaggcctgccgctcagtctcggttaatttcgccggatccagcacgctggggtccccccacaccgtcgggtcggccttgcgtagctgggcctggggcgagagcaggaaattcgcgaccactttcgcccccgccgtcgcccgggcattggccgggatcgccacaaagtggacgttgccaagcatcccctcgcggaagccgaaaccgtagctgtctttcggcagctcgccgctgaccgctttttgctgcgcgtgcagcgggttaaaggtgatggacagcctgagggtcccatttttaagcatggcatccatgcgggcgggcgaagccgggaagtcgcggccctggcgccacagcagaggatgaagccgatcaagatagtgccacagcggcgcggtcacggcggcgaaggtggcctcctcaggcggctggcgtagcgcgtcgggccgcggagtcagcgtcagcagcagctgttcaagaaacgcggtaccggtaaaatccggcggacgcgggtaggtgacgctgccgggatgcgcggcggcgaaagccagcagcgcctgcggagaggtgggcccgtcgggcgtttgtgatcggcgggcgataaaagtgagctgcgcgccgccccacggcgactcggcgccgtcggtggggatggagaaatcctcgcgcaccggcttttgcgtatcgacaaagcgccagttgggcagggtttccgcccaccgggtttgcagcagcctggcgtttttcagggtgcggaagttttcgccgttgacccacagcagatcgatggaaccgcctttactgcgtccggcgcgggcttcggtctggatgcgctttaccgcgtcggcggcatccgcaatatgcacgatgcgcaggtcgatagcgtagtcgcgctttacctcaccgctgacccagtcgagatagcggttcaccgccggatcgccgccccaggcgttaaaccacaccgtctggccgcgggcttcttgttgtagggattgccagccggcgctggcggccagcggggagagcaacagcaaagcgaagaccagcacactgcgcataaccactccttatggttttgaatcggttgggatccggcacaatccctgggcggggatcgccatggccgaattaaagcgcgccgacaggttttgtaaaccgatcagcgccgtgagttcggtgagcgcgcgggcgtcaaactggcctgccagcctgtcgcgcagcgcatcgtcgaccaccggcggcgtcatgctggccgcctcggcatactccagcgccagccgctcgcggtcgctgaacagcgcgctgtcccgccattcggcgaccgccagcagcttagcgctgccgccgctgcgttccgccagcttcatattggtgatatcaatgcaaaactcgcacaggcacagctgcgcgacgcgggcgctgaccagcgatctcagcaccggatcgaggggcgaacgcttgcgttccagatagccgacgaacatcgacaccaggtaaaacaccagcggaatacggccccaccagcggatagggctgagcacctcgccgtagtggcgacgatgcagccaggcctgcgggcgaagaatcagcggaatggacttcagagggggtaagctcatcgtgaacgcctcttttgttgttcaagatagagcgctttcgcgacgaccaccacaatcgccagcgcaaacaggatcgataaaccggtcaccagccagaatgtgccgccggtcagcaggctgccggtccacgaatagactatcgtcgcgggcagctggccgagaccggtggccagcataaagtggcgaaagcgcattgacgtcagcccggcggcgtagctcaccgggtcgaagggaacgaaagggagcagacggcagattaatatggtgtgtttgccgtagcgggtaaaaaagccatccgtactctgcagtacgctcttgccggtgagcttttccaccgcgtcgcggccgagcgctctggcgataaaaaagcacagcgccgcgccggccatcgcgctcacccacgacagcgcgccgccccagaaggcgccgaacagggaagcgttagcgaaggtgatcaggaaggcgggaagcggggcgataatcgcctgcaaaatcatcagggcgaaggagaccagcgccgcctgcgggccccaggagtcgataaagcgttcaatagcctgctgatcgagcgtggcaaaagcggcgaggctgcgctgcataaactcattgacgccgggtatcagccaccatgccagcagaagcgtaaacagcgtcatgccgatggctatccggtagcgcgcgttgctatttttcatcgttagcctgtatccgtgatgtctcgattcgccgatagcgggcatagcttttcgccgcctgaatcaggacaaataaagccagccccgcgagggtcagcttcagtataaacaggggggtgataccctcgcggataagctcgctggccatcagcgtatagataaatatgccgggcaaggtggtgagggcggaaataaaggtaaacgtccagaacggaatcgccgtcaggccataggcgtagttctgaacattatagggaaacagcgggatgagccgggtcagaattaaaaaatcggtgccgctacgggcgatgcctttttcaatggcctgaaatatcgccgtctgcccgacgtatttaagcagcagctcgcggcccagccagcgggcgaacagaaacgacgcggaggaggcgagcgtcgccgccagcagcgatagcaaagttcccgccagcggaccgaaaatcaccccgccggcaatcactaaaagagtgcccggtagcaaaaacagggtggcgacgataaacagcagaatatagagcgtatagccgaaggcgccgctctggcggatcatttcgcgcagacgatcaaaatgggtaaccagcccggcaaaacccgactgctgaataagacaggcgacaatgctcaatatcaccacaacaaaaagcagcttatattctgctttatgacggcttcttttgcattgggttctcctgtatggcgcgggcggtctgaagtgcgcgcgacagtataatagtttgccgccgttcacaatctctgacggcggcttttttgatatggctcaggctctccggacgggagagcctgacggagggaatatttagactttaaaggtcgcccataccggcgcgtggtcggacggcttttccattgcgcgaatttcgtagtcgataccggtttcgatgcagcgctgcgccagcggggtgcttgccagcagcagatcgatacgcagcccgcggttatcgtcaaagcccttagagcgatagtcgaaccacgagaagtgttcgttatcctgcggattcgcatggcggtaagtatccaccaggccccagctcagcaggcgctccatccattcgcgctcttccggcaggaaggaacacttgccggtacgcagccagcgcttgcggttctcttcaccgatgccgatatcgagatcggtcgggctgatattcatgtcgcccatgatcagtaccggattctctttattcagttcggtatcaaggtagttttgcaggttctgataaaacgccgccttcgccgggaatttggtttcatgatcgcgactttcgccctgcgggaaatagccgttaatcaccgtcacgttgccaaacggggaagggatttccgccatgatgatgcggcgctgggcctcttcaccatcgtttgggaaaccgcggcgcacggagatcggcgtctctttggtcagcagcgcgacgccgtaatggcctttctgcccgtgataaaagacgttatagcccagctttgccacctcttcgagaggaaacatatcgtcgtgaactttggtttcctgtaggccgatgacgtcgggctggtgtttatcgatgatggcggccagctgatgcgggcgggcacgcaggccgttgatattaaaagagacaaatttcatagtcgctgccactgtgcaaggtgaatagtgcagggatggtagcagaaattcgccgggctggctgcgcaaaggcgctttattctgccgattgcagcggttggtagcctgtttgcacaaactgtgcaccattctggaacgcgctgcgccaaaaaagggcgattattgccgataaatttcgtcaaggatcacaattacagaattatatcttacccctgcataatctttctttttattccactgcaaaagcctcttttagtatttttattcactttttatgcattttatgtgaataacggtatttcgtaacttattgatatttcgttgacgacctcgatttatgcatttttacctctggctggcacgaaccgtgcaatctacatttacagcgtaataaccatattcattaacattatttaaactttttatttaccggaagaggtcgatatgtctcagtcaattacgcgtagcaactttgatgaatggatgatgcctgtatacgcgccagcggcttttattccggtacgcggcgaggggtcacgcctgtgggatcagcagggaaaagagtatatcgattttgccggcggcattgcggtgaacgccctcggccacgctcatcctcggctggttaaagcgctgaccgcgcaggcggaaaagttctggcataccggtaacggctataccaatgagccggtattgcgtctggctaagcagctgattgacgccacttttgccgaccgggtctttttctgtaactccggggccgaagccaacgaagcggcgctaaaactggcgcgcaaatatgcccacgatcgtttcggcagcgagaaaagcggcatcgtggcgttcaagaatgccttccacggccgcacgctgtttaccgtttccgcgggcggccagccggcctattcgcaggattttgcgccgctgccgccgcagattcagcacgccatctataacgacctcgactcggcaaaggcgctgatcgacgacaatacctgcgcggtgatcgttgaaccgatgcagggtgaaggcggcgtcgtgcctgcggatgcggacttcctgcgcggcctgcgtgaactgtgcgatgagcacaacgcgctgctgattttcgacgaagtccagaccggcgtcggccgtaccggggagctgtacgcctatatgcactacggcgtgacgccggacgtgctttccaccgcgaaagcgctgggcggcggtttcccgatcggcgcgctgctggcatcggagcgctgcgccagcgtgatgaccgtcggcacccacggcacgacctacggcggcaacccgctggcctgcgcggtggcgggagaagtgtttgccatcgtcaacacccgcgaagtgctcagcggcgttaagcagcgccatcaatggttctgcgaacggctcaacgcgattaacgcacgttacggcctgtttaaagagattcgcggcctggggctgcttatcggctgcgtgctgaaggatgaatatgccggcaaggcgaagaccatcagtaatgaggcggcggaagaggggctgatgatgctgatcgccggcgccaacgtggtgcgtttcgctccggcgctgattatcagcgaagaagagatcaacgccgggctggatcgcttcgaactggcctgcaaacgctttctcgcgggggtctcatcatgatggtgatccgtcctgtagaaaaaggcgatctgccggggctaatgactctggcgggcgagaccggcggcggcctgacgtcgctgccggccgatgaagccacgctggccgcgcgcattgaacgttcgcagatgacctggcgcggcgagctgccgaaaagcgagcagggttatgtgttcgttcttgaggactgcgccagcggcgcggtagcgggaatttgcgccattgaggtggccgtggggcttaacgacccctggtacaactatcgcgtcggtacccaggtgcacgcatcgaaagagcttaacgtctacaacgccctgccgacgctgtttctcagtaacgaccataccggcagcagcgaactgtgtacgctgttcctggacccaaaatggcgtaaagagggcaacggctatctgctgtcgaaatcgcgttttctgtttatggccgcctttcgcgaacgtttcaacgataaggtcgtggcggaaatgcgcggcgtcattgacgaacacggctactcgccgttctgggagagtctcgggaaacgcttcttcgcgatggagttctcccgcgccgactacctgtgcggcaccgggcagaaggcgtttatcgccgcgctgatgccgaagcacccgctgtatatcgactttttaagcgacgaagcacgagcggtcatcggcgaggtccatccgcaaaccgcgccggcacgcgcggtgctggagaaagagggatttcgctatctcaactacgtcgatatcttcgacggcggcccgacgctggagtgcgaaattgaccgggtgcgggccattcgcaaaagccggctggtcaccgtcgttgaaggccagcccgcgccgggcgagtggccggcctgtctggttgctaatgagcagtaccagcagtttcgcgccatgctggttcacgccgacccggagagcgaccgcctggtgctaagcgcgcgcgagctggatgccctgaaatgccaccccggcgaccagattcgcctggttcgtctgtgccctgaggagaaaaaatcatgagtttatggattaacggcgactggcaaagcggtcgcggcccggcccgtagtaaacataacccggtaagccaggcgctgctgtggcagggcaacgatgccgatgccgggcaggtggcgctggcggtcaccgcggcgcgcgcggcgtttcccgcgtgggcgcgtcaaccgtttgccgcccggaaagcgatagcggaaaagtttgcttcgttactggaagcgaacaaaggcgaattaacccggattatcgcccaggagaccggcaaaccgcgctgggaagcggcaacggaaattaccgcgatgatcaacaaaatcgccatttcggtgaacgcgtatcatagccgtacgggggaagcgcagaccgcgatggcggacggagaggcgacgctgcgccatcggccgcacggcgtgctggcggtctttggcccctacaattttcccggacacttgcctaacgggcatatcgttccggcgctgctggcgggaaataccgtggtattcaaacccagcgagctgacgcctcaaagcggagaggcggtggtgaagctatgggccgaagccggcctgccgccgggcgtgcttaacctgctccagggcgggcgggaaaccggcgaagcgctgagcggccaggcggacatcgacggcctgctatttaccggcagctctgcgacgggttttcaacttcatcgtcagcttgccgggcagccggaaaaaattctcgctcttgagatgggcggcaacaacccgctgatcgtcgatgacccacaggatatcgacgccgcggtccatctgaccattcagtcggcgtttattactgccggacagcgctgtacctgcgcgcggcggctgctggtaaaacgcggccagatcggcgatgcgtttcttcagcggcttgtgacggtgtcacaaacgctgattcccgacgcgtgggacgctgaacctcagccgttcctcggcgggttaatttcagcgcaggccgcgcaaaaggtacatcaggcctggctggcccacgtggccagcggcggaaaaaccctgctggagccgcgcctgctgcaggccggaacctcgctgctgacgccgggtattatcgaaatgagcgcggtggcgcaggtggccgacgaagaggtcttcgggccgctgctctgcgtctggcgctatgaccatttcgatgaggcgattgccctcgctaacgcgacccgtttcgggctttcctgcgggctgatctccgccgaacgcgacaaattcgaccagctgctgctggaggcgcgggccgggatcgttaactggaacaaacccttaaccggcgccgccagcaccgcgccgttcggcggtaccggcgcttccggtaaccaccggccgggggcgtggtacgccgcagactattgcgcctggccgatggccagtctcgaatcaccggagctggcgctgccggcaaccctcagccccgggctgaatttccgtaaggagacatcacaatgaaagcccgggaagtgaactttgacgggctgccgggcctgacccaccactatgcgggtttatctttcggcaacgaagcctcgacgaagcaccgctatcgggtgtcgaacccgcagctggcggcaaagcaggggctgaaaaaaatgaaagcgctggcggatgctggctatccgcaggcgctgatcccgccgcaggagcggccaaacattccgctgttgcggcagatcggttttagcggtagcgatgagcaggtgctggaaaaggcggcgcgccaggcgccggaactgctctcggcggtcagctccgcgtcatcgatgtgggtggctaacgccgccacggtctcgccctcggccgattcgctggatggccgggtgcatctgaccgtcgccaacctgaacgataaattccatcgcgccagcgaagcgccgaccaccgaagcgctgctgcgggcgattttccccgatgagcagcggtttgctgtacacggcgccctgccccaggtatcgctgttcggcgatgaaggggcggcaaaccacaaccgcctcggcggcgactacggcgcgcccggcgtgcagctgtttatttacggccgccagcaggggggcgaagataatccgctgcgctacccggcgcggcagacgctcgaggccagccaggccgtcgcccgcctgaatcaggtcaatccccggcaggtgattttcgcccgacaaaatccggcggtgattgataagggcgtgtttcataacgatgtgattgcggtaagcaatcagcaggtgctgttttgccacgagcaggcgtttgttgaccagccgcagctcctgcagcagctggcgcagcaggtctccggctttacgccgctggtggtgccggcgagtcaggtttcggtggaagaggcggtggcgacctatctgttcaacagccagctgctaagcaaagaagaaggcgggatgcggctgattttgccgctggaagcgcaggaacacccgggcgtctggcgctacctgaaccggctggtggagggcgataaccccatcgatgagctacaggtttacgatctgcgcgaaagcatggccaacggcggcggcccggcctgcctgaggctgcgggtggtgctgacggaggacgagcgacaggcggtgaatccggcggtcatgatgaacgatacgctgttcgccacccttaatgactgggtagaccgctactatcgcgatcgcctgacccaggtcgatctcgcggatccgcagctgctgcgcgaaggccgcgaggcgctcgaccgcttaacgcaaatcctgcgcctgggctcagtgtatccgtttcagcaataaggaggcgtcgtggacgactttctggcacttactctggcggggcgtctgccccaccatttccatggtcaaaccgcgcatttccgctggcactggattgactgcggtattctgcagctcattcctcatgaaccctgcgatcggtcattggttttgtcatccgggcttcacggcaatgaaaccgcgccggtcgaaatcaccgatttactgctgcggcagctgtttcgtggggaaataccgctccgctggcggctgctggcgatctttggtaaccctccggcgctgcgggccaacaagcgctatatgcacagcgatatcaaccggatgttcggcgagcgatggcgcgcttttagcgccagcgatgaaaccgttcgcgcccggcagctggagcatgcgctggcgcgattttatgccgggacgcccggcgagcgctggcacctggatttacataccgccatacgcggttctctgcatacccgctttggtgtcctgccagcgcgggatacgccgtgggatgaagcgtttttgcgttggttaggggctgcagggctggaggcgctggtgtttcatcagcagcctggcgggacttttacccatttcagctgcgaacgcttcggcgcgcgctcctgcacgctggagctcggcaaggcgctaccttttggcgaaaacgatctgcgcttgttcgcgacgactcaacgcgcgctgtcgctgctgctggcgggagaagtggcggcggaagaggcgcacgcgccgctgcgctacagggtggtacagcaaattacccgcagcagcgacagtttccggctgcatatgtcggcgcagacgctgaactttacgccgtttgccgccgggacgctgcttgctgaggatggcgatacccgctacatagtggaaagggagcaagagtacgttttgtttcccaaccccagcgtcgccttcggccagcgcgccgggctcatgctggagcgcttccggtgaatccgtcgcccgtccgggcggcggcatttatttcagcgtttatttttccgcagccatcttattttttcgtgctctgtccattgattgcagattattcctggttaaatgctttgtttttaatctccgctgatttataatcttcataatttcccactaaaacagttgcttatttattttctattgcatttgttccctcattttccttattttctccataattggcgagaaaatgttttttacactttcaatgttttacgcttgctctgattaattgacgataaacgtcgtaaagttaatctcgtcaacacggcaacgcgccgtaagaataacgcaaagtaaggattgaactatgaagaagattactgcactgtttgttgcctctactctggctctgggcgcggctaacctggcccacgcggctgacgctactgcaaccccaaccgataacgcgccgatgatgcatcataagcgcggacctgcgggcccacatgaaatgatgtttaaagggctgaacctgaccgatgcgcagaaaacgcaaatccgcgacattatgaagagccagcgcgacaacatgaagcgtccgtccctggatgagcgccgcgcgatgcatgagctggtagccagcgataccttcgataaggcaaaagcggaagcgcagattgataagatggaagcccagcataaagagatggcgctggctcgtctggaaacccagaataagatttacaacattctgacgccggaacagaaaaagcagttcaatgccaattttgagaagcatctgacagatcgtaaagcgccggaaggtaaaatgcctgcacctgctgaataactcagcgcgctgacttaagaccgccggtcttgcccaataacgccaacaggctttgggcaggaccggcggtttttctttatctgtagcgacaagctgatttacccggcagggacgaatgtgccagtatgagtgccatcgccacggactctggtgtcctggtctaaagcctactctgctcatggatcttgcatatggaaatgtatatcggcctcgccgtcctcgttgtcgtcctcatctgggtcgtgatgacctataaccgctttatctccctgcgacgtttcaaagacgaagcctggagcggcattgccgtacagcttaagcgccgccacgacctggcgccgaatctgctgagcctggtgaaacgctatgcgcagcatgaaaaagaactgctggaagagatctcccgccagcgcggcgaactggtcggaagcacccgacagatcgccgacagcgaacgccagtactcgggtacgctagggcgcgttttcgcgcttggcgaagcgtacccggaacttaaagccagcgaaaactaccttgccttacagcaatctctcagcgaaatagaagagcagctgcagatggctcgccgctacttcaacggtacggtgcgcgatttcaatatcctggtcgagtctttccccagcctgctgctggcgcgactgtttaattttcaaacggaagtgttcttcgagctggactcaccagaagaagctaaatcaccgcggatggcgtgattaaatggcgaatttactttttcgggggctgcgcaccctcgtcctgctgctgcttctgaacatcagcgcggcttttgccgccggcgacatgatcatcatcaaggatgcttcccagcttcccgctggcgctattccagcgtatgaacatatcctctctttcgatgcccgggcgcgctttaacccggacggtagcatggagatgcgggaaaatatcaaagtactttctctgggcaggcagattcggcggggaattttccgtacgctgcccctgacctggaaccgccaggacggcaagatctttcgcgtgtattacgcgatcgagtcggtgtcgcgcgatggcgtgcctgagccgtttagccttgatgaagcggaaaaaaacctgacggtacgcattggcagcggcgaacggctcctgaaaccagggatctataactacgagattcgctatcaaatcagcaaccatttcagccgcttccccgaatgggatgagctttactggaacgtgacgggcaatgactgggcgtggcctatcagcaaggccagctttcgtcttgaactgccggacgccgccggaaatctcaacgccgacgctaaggacgccagagtgcggtcgcttgatgtttataccggcgtcgcaggggcgaaagaacacaacgcgcaggtgcttcctgacggtagcgtccgcaccctgcggcctctggcgcggggggaggggctgaccgtggtctatacctggcctcggtcgatccttgccgatgctccggcgccggaggccgctttgccgctggtgcatctccttatccccaccctaaaaaccggcgtggtctggctacctctgctgctgatggccgcttattacctgatctggtggcgaaaaaacgtcaccaaagccgggctaaaaatgccgccggtcgttgcgctttattcgcctcctcccggcatgtctccgggctacctgcgttttatcacccggcgtaaatatgatgatgtggcttttagtagcgatttattagcgctggtggctaaacgcggaatggcggtcagcggggacagtcaacacacccctaacccgtggcttgcgaacgccggcgtaaaacagcggctgacccgtttgcccgtcgagggaaaccggcaattaaactatgatgacaggcagctattaagtacgctttttaaaggtaaacaaaaaaatatcgatctcagcaaggcccatcagcgatcgatgcagacagcgcgtgaagagcaggaaaagcgttgtgaagcgcagcgggataaattatttcgcaaatgggggcagccgctgcggcgctgcatctacattgcgctgttggtgccggtggcctgcggtctttgggttaatacggaggccgcgctgctgacgataccggccgcggtttttatgctgattggcggagcgatgctcgcctgtttgctgcgctttatatgccgcccgcgggaaatgtggcgtgcctgggggccggtgccgctcttttttttggcgatcttcggccccttcgcgacgctgggaggcgggatttttctctttggtatactgcccatcacccagcttccgtcaggatacattggcgcgcttatggccgcgctggtgctctgcgttttcgtggcctggaaaacgcctcgctatacgcagcgcgggcttgatgaactggctatcgcgaaaggattgatgcgctatctgggcaccgccgaaaagcatcgttatcagattatctatccgcccgagcagatgatttcccattttgaagcgctgctgccggttgccctggcgcttggcgtagggaaaacatgggcaaatacctttgcccactacctgagtagtacaggcgccgtgtcgcatgcgtttgccggcgccgactggggaagcgtccaccacttcagcgaagcctgccgaaccgcctctatgtcaacgccggatagcggttcagggaacggttcatcatcaggttccggttacagcggctccggttcctccggaggcggttcatccggaggcggctctggcgggggcggcgggggcggctggtaattgccccgatagcgcatcggggctgacattcgcctcacagaggatggagcttatagcggccgctgagcagcggcttacacaatattttataaccgtcatggtcaaatttggccgacaggcgcgtgagtgatgacgcctgcgacagagactctaccgcgccgagccaaagccagttttgaataatgtggtattgggtcatatcctcgctgctctcttccagcgcgatcgccccggcccagggccagcataccagctgcatcttttgcatattgtcgaccagacgctgctggtgtgcttcaacgctctcttttccgcaacaggcgcccgcgcagcggccgagcgccgaacgaaagcaggcccgcccgcggttgagcggctcgaggcccattaatccgtagcacaggcgatgctcgtcggcaattttttgcagcgcctgcagcgccgcgcggcggttggcaaaaagaccatagagatcgctttgcagggaaaaatccagctcgctggcgtacaccacctgcggacgggcgtcagccaggcgtaatgaacatagctgtcggttttgccgcagacgcttattgaatagcggctgctgttctttaatgagctgtgcctctaataagagtgcgcccagctctcccgccgttcgttgccaggtaatgcgccgggactggcgcagcatcgccgcttcgtcgggcgtgcgcagatgcgacaacacccggctgcggatattcacgcttttcccgatatagagcggtagggtatcgctttcgccgtggaacagatacacccccggctgcctgggcaaagcctcaagccacggacgcagatgttcgggatactcataaattgccgccgcttcaaattcgagacgcggggcggattgccttcttgccacttttgctcctggtgctggttatttatccagtatagcagccgaaggaagaggcgaaaaggataaaaaatcgccccgaaccgggtcggggcggagggggagaggcgaattactttttccagaagtcgtcgaagaccgtaatcggcggtcggcgtttatgctcggttttcaaataccagccttcaatcgttttcgcaattttctcatccagcgctttgccttccagataatcatcgatattttcgtaggtcacgcccagcgccacttcgtccggcagggaggggcggtcgtcctcaagatcggcggtcggcagctttttatacagatgctccgggcagcctagctgggccagcagctgtttgccctggcgtttgttaaggcgaaagatagggttaatatccgtaccgccatcaccgtatttggtgaagaatccggtaatggcttccgctgcatggtcggtacccaccacgacgccgtgggtcattccggcgatgctgtactgcgccttcatgcgttcgcgggctttttcgttaccgcgaacaaagtcgctaagttcaatcccggcctcgcgcagcgcctgttcgctggccagcacggcgcctttgatattgaccgttaatacgcgatccggctgaataaaagcgatagcgtcctggcagtcctgctcatccgcctgcacgccgtagggcaggcgcacggcaataaactgcaggctgctgtcaccggtttcggcacgcagttcgttgatggctaactgacacaatttaccggttagcgttgaatcctggccgccgctgatgccgaggaccagtgatttaataaaagggtatctctgaagataggccttcaaaaagtctacgctgcggcgtatctcggcttcgacatcgatctggggttttgcgcccagcgcctgaataatctcttgttgtagcgtcattgcgccctccgggaagtgaatctgtttgccaataagcagtggtttaacctacctctttgccggtaaaacgacaaggatcacaattttgagtgaagcaaaagcaggcaacctcaacaagaggggatttattattggaaagctcttaatttcgcttcatttccaccttcggcttgaaaaataacgatatttattccaggcttattaacacgccaaaaaaaagaggatggtatatgaacaagcattttgcaggatttctgggcgcagcagcagtattgaccctgctggcagggtgtacggcctacgaccgtacgaaagatcagttcactcaacccgtggttaaagacgttaagaaaggcatgacccgcgcgcaggttgcgcaaattgccggtaaaccttcatcagaagtcaccatgatccacgcgcgcggtacctgccagacatatatcctgggtcaacgcgatggtaaaattgaaacctacttcgttgcgctggatgaaaccggccgcgtgatgaattctggctatcaaacctgcgccgagtacgataccgacccgcgcaacagtaagtaacgccccgccatagtgctgattcctacgaaagcccgaccagtggtcgggtttttttatgagttctgatgcttatttaattgcgcgaattatttgagggaaatgtgaaggcagtcaaaacgcgaggtcaatgagagacaattctgttcaaggaggaattatcctgctgccgatcgatgccgtatactcaatgcataaacaatactaattcaaagaaacatctcttaccgcctctcaggcatcaatgctgcagagaggaccgggtcacacaaattgaggaagcgttcatggaaaagaaacatatctacctgttctgttctgccgggatgtcgacatcactgctggtatcgaaaatgcgtgcccaggccgagaagtatgaagtgccggtgattattgaagcatttccggagaccttagccggtgaaaaaggacctgatgcggatgtcgtattattaggcccacaaatttcctatatgctgccggacattcagcgtttactgccaaataaacccgtagaagtcattgattctgttttgtacggtaagatcgatggtttaggtgttctgaaagcggccgttgcggccattaagaaagctgctgcacaataattttattttaaaactcgacatatttcggatagcagcggttagaatttcgtgagggtgtgttttagctgctcgctgtccgaaatacccagagtttattttcccgtcaaagagtaatttcatctatcattgccgcagtgactatattgcggccttaaagggtatttattatgagtaaagtgattgactcgcttgaaaaggtactcctgccttttgccgtcaaaataggaaggcagccccacgtcaatgcaattaaaaacggctttattaagttaatgccattgacgctagccggggcgatgtttgttttaattaacaacgtatttttgagctttggcgacggctcattcttttattcaatgggcatccgtctggatgcgtctacaatagaaacgcttaacggttttaaagctatcggcggtaacgtttataacggtacgcttggcattatgtcgctgatggcgcctttctttattggctccgctttagctgaggagcggagagtagacccgatggccgccggtttactggccgttgcggcatttatgaccgtcacgccttatagcgtcggtgaagcctacgccgtgggcgcgaactggttaggcggcgccaatatcatttctggtattgtcatcggtctggtcgttgccgagatgttcacctttatcgttcatcgcaactgggtgattacgctgccgtccagcgtgccggcttcggtttcccgttcattctctgcggttattccggcctttatcatcctctcgattatggggattatctcctgggcgttgacccactgggggactaacttccaccagatcatcatggacactatctccacgccgctggcttcaatgggcgccgtcgtaggctgggcatacgtcattttcacctcgctgctgtggttcttcggcgtacacgggtcgctggcgctgtcagcgctggatagcggaatcatgacgccgtgggcgctggaaaacatcgcaacctaccagcagtacggttccgtcgaggccgcgctggccgcgggtaagagcttccatatgtgggccaagccgatgctggattcctacatcttccttggcggtaccggcgcgactctgggcttaatcatcgccatctttatcgcttcacgtcgtgaggatcatcgtcaggtggcgaaactggcgctgccgtcaggcatcttccagattaacgagccaatcctgttcggtctgccgatcattatgaacccggtgatgtttatccccttcattctgattcagcctctgctggcggctatcaccatgacggcttataccctgggcatcatcccgccgattaccaatatcgcgccgtggaccatgccaaccggtttaggcgccttctttaacaccaacggtagcgtagccgctctgctgctggccctgttcaaccttgccgtgtccaccctggtctacctgccgtttgtggtgatttccaacaaagcgcagggcgtcattgagcaggaagagagcgaagaagatatcgctaacgcactgaaattctaatattgaacggtacgggagatttcccgtaccgtcctggaaataagggagtcattatgtttgatctggataacatcgcagcagaagagaccgcggtaaacgacctcgaagaggtggtgatggggctgattatcaactccggtcaagcgcgcagcctggcttatgccgcgctgaagcaggcaaagcagggagatttcgaggcggcgaaaacgatgatggaacagtcgcgcatggcgctgagcgaagcgcaccttgtgcagacgcagctgattgagagcgatgagggtgaaggcaaaatgaaggtgagcctggtgctggttcatgcgcaggatcatctgatgacctcaatgctggctcgtgagctggttgccgaattgattgagctgcacgagaaggtacaataggtcatcgacacgatgaggcagccaaagatgatgaccactgaaatcagtaccgcccgggagcaacaactctttaacggcaagaactttcatgtggtcatctataacaaaacggagagcgtaagcgggcttcaccagcatgattactacgagtacaccatcgttttaaccgggcgctattatcaggttattaatggcaagcgggtgctgctggagcgcggggattttgtcttcatcccaatggggtcgcatcaccagagtttttatgaatttggtgcgacgcgcattcttaacgttggcatcagcaaaagtttctttgagaaacactatctgccgctgctgccgtttggtctggtcgcctcacaggtctatgccgttaaaagtacttttctcagttatattgagtcggttattgcatcactgaattttcgcgaaactgaattcgacgaatttatcgagctggtgtctttttacaccctgaatcgtttgcggcattatcgtgaagaacctacggaagacgttattccgcaatggttaaaaaataccgttgagggtatgcacgataagcttaaatttggcgagggggcgctggaaaatatggtcgagctttccgggaaaactcaggaatacttaacccgggcgacccagcgttattacgccaaaacgccgatgcagatgattaacgatattcgcatcaacttcgccaaaaaacagctggagataaccaactactcggtgaccgatatcgcctatgagtcggggtacagtagcccaagtctgtttattaaaacattcaagaagctgacttcttttacccccagcagctatcggaaacacctcaccagtattaattaaccgggcgcggaatagtccgcgcggtctaaatattcaaattaactgtccgtatttaaacggagagcgggtgccgcatacgcgctatccgcaagggagaaaaagatgagccagaaattgaaggtagtgactatcggcggcggcagcagctataccccggaattactggaaggattcctgaagcgttaccatgaactgccgattagcgaactgtggctggtggacgtcgcggaagggcaggaaaagctcgatataatccacgcgctgtgccagcgcatggtggaaaaagccggcgtcccgatgaaagtctacaagaccctcgatcgccgcgcggcgctggaaggcgcagatttcgtcaccacccagctgcgcgtcggccagcttaaggcgcgcgaaaaggatgagcgtattccgctgagccacggctatttaggccaggaaaccaacggcgcgggcggactgtttaaaggtctgcgcaccattccggtcatttttgacattgtgaaagatgtgcaggaagtctgtccgaacgcctgggtgattaactttaccaacccggcgggtatggtgaccgaagcggtttatcgtcataccggctttaagcgctttatcggcgtatgcaatattcctatcggcatgaagatgtttatcaccgatgtgctgaagctgagcccgagcgatgagctcaatatcgatctgtttggtctgaatcatctggtgttcgtgcgggatgtgctggtcaacggcgtttcgcgctttgacgagctgcttgacggcgtggcgtcgggtcgattgagcgcaaactcggtgaaaaatatctttgatttgccgtttagcgaagggctgctccgttcgctgcgcctgatcccttgttcctatctgctctactactttaagccaaaagagatgctggcgattgaaatgggcgagtactacaaaggcggcgcccgcgcgcaggtggtgcagaaggttgagaaacagctgtttgagctatacaaagatccggatctgaacgttaaaccaaaagagctggaacagcgcggcggggcgtattactccgacgcggcctgtgaagtgattaacgccatttacaatgataagcaggccgaacattacgtgaacgtgccgcaccatggccacgtggataacatcccggccgactgggcggtcgagatgacctgtacgctgggtcgcgacggtgcgaaaccgacgccgcgcatcacgcatttcgacgaaaaagtgctgggactgatttacaccattaaaggctttgaagtcgcggccagcgaagcggcaatcagcggtaaactggatgacgtgctgctggcgcttaacctgagcccgctgatccactccgatcgtgacgccgaacagctggcgcgtgagatgatccttgcgcacgagcagtggctgccaaactttgcggcgactatcgaaaaactgaaacagtaacgggagcggcttatggaacgcgtgttaatcgtcaatgccgatgattttggcctcagcaaagggcaaaactacggcattatcgaagcctgcaagaacggtctggtcacctccacgacggcgctggtcaacggcgcggcgatcggccacgctgcccagcttagccgctgcgtccctgagctggcggtggggatgcactttgtcctgacgctgggcgaaccgctgtcggcgatgccgggcttaacccgcgaaggtcgtctcggtaagtggatttggcagatggcggaagaggatagcctgccgctggatgagatcgcgcacgagctggagtgccagtaccggcgctttgtcgagctgtttggccatgagccgacgcatatcgacagccatcaccatgtgcatatgattgcgcagatttaccccatcgtcgcggcctttgcgcgcgagaagggggtggcgctgcggatcgatcggcaactggcgacgctgtcaggtttagcgcaggatgcggcgcgcagcagcgacgggtttaccagcgagttttacggggaaggggtttcggaagcgctgtttctgcaaaccctggatgcctctatccagcgtgatgagcgatcgctggaggtgatgtgccacccggcgttcgttgataacacgattatgggtagcgcctattgctacccgcgcctgaccgaactggacgtgctcaccgccgagtcgctgaagtatgcgattgccgagcgcggctaccggctcggcacctatcgcgatgtgtaagtaaagagaagtgagaagcccggcagaaatgccgggctttttttacgccgggatcgcggagattttggcgcttctcgaccacacccgatgcgccgccatcagggtaatcagcgcatccaccgacgcattatcgatggcgtccgtctcaacgatgccttcttccccctgactggcaacctgcagcggcgctttgcactgccgggcatcgcctgccagcagaatcggcttcaggtgtttataggcttccagcaggtagtagtggaaatcaccgttgttgctcaggctttgcagatcgccgccgggaacaatgaccgcgtccacggtaagcgatggcgacccggcaaaggtcccggccaccggcagctcggtaccgtcatcggcctgcactttccccattcgggaatagagtagtttggcatgcaccccgtgcgctttcagcgccttgagcagcgtcaggagctctttggcgaccggacgatcgttaagcagtaccgctaccacccggccttttacgtcaccgctgggaatagcgtacaggcttaacgtaggatcctttttcagaccgttaacatccggcggcggcgtgatgctgcgctgttcgtcggtgagctcaatacccagatttttacccaccgcctgagccagctgcaggtcgatatgcgccagctgatcgaccacccgctcgcggatccactccctgacgaccttgctcagctcgaagctgaatccgtcgataatatgctgctgctcaataggcgtctggctacgccagaacagcaggggctgcgagtaatattcgccaaacgacggactgcgctggcgaatcttttccccgtcaacccgctcggcataggattcaaagccgccgcgtttagcggccggcggcgtctcccgcggccagttatcgttgatggagttaggttcatagtttgccgggttggtatcaatatccatccggtgcatgccgtcacgctggaaattatggtacgggcaggtgggtttattgatcggaatttcatggaaattcggcccgccgaggcggctgatctgcgtatcggtataggagaagagtcggccctgcagcagcggatcgttgctgaagtctatccccggaacgatatgccctggatggaaggccgcctgttcgttttcggcaaagaagttgtccgggttgcgattgaggaccatcttaccgacgcgctgcaccgggaccagcgcttccggaatcagcttggtgggatccagcagatcgaaatcaaaagcaaactcgtcctcttccgggatcagctgtaagcccagctcgtactcaggataatcgccggcttcaatcgcttcccataaatcacggcggtggaaatcgggatcgcgaccggtcagcttttgcgactcgtcccataccagggaggctttgcccgcgaccggcttccagtgaaaacgtacgaaggtggctttaccttccgcgttaatcaggcggaaggtgtggatgccgaacccttccatcgtgcggtagctgcggggcagtccgcggtcggacatcgcccacatcacgttatgcagcgtttcgggctgcagtgagacgtaatcccagaacgtgtcgtgcgcgctttgcccctgcgggacggcccagtgcggctcgggtttgaccgcgtggacgaaatcagggaacttgatcgcgtcctgaataaaaaagatcggcgtgttgttgccgaccaggtcaaagatgccctcgtcggtataaaacttggtggcaaagccgcggatgtcgcgcaccgtatcggcggagcctgcgccgccctgaacggtggaaaaccggacgaagaccggcgtttttttctgcggatcgcagaggaaagccgctttggtgatatcgcttaaatcgctgtacgcctggaaatagccgtgcgcagcggagccgcgggcatggacgatcctctcaggaatgcgctcgtggtcaaaatgggtgattttttcgcgcaggataaaatcttccagcagcgtggggccgcgtttgcccgcgcgcagcgagttctggtcgtctgcgatgcgtacgccctgattggtggtgagcgcaaaatcctcgccgcctttacgctgtttttcaagggcatcgagcttttcgctgcgcgtatccggggctttcatactgcccggggcggtcggctcttcacctggggcggtgggatgcggcgtgggccgccagttctgatcttcgggggctaaggcatccagacctggttttgcttcccggtcgtcgtgaaccggtgattgatggggttgcgggttatggtgtttatcagacattgctcgctcctgctttcattgctgaaaatggtcgttgctaaaccaaaacccttctaattgtagaacatcatttcaagaatatatttttataagagttttactactaaagggccgcaagctgggggcgacgaaagggggctttttcggctatgataggggtttctgtttcccgctgtgtttagtgaatctatttgtgatgaaaccacttcgccaacaaaatcgtcaggtcattagctacgtgccgcgagtcgagcctgcgccgccggaacacgccgtcaaaatggatggttttcgcgacgtctgggttttgcggggtaaatacgttgcttttgtgctgatagacgaacattttcgtcgctccccgccgtttaacgtgccggaagcggcgcagcgctgggcgacgcaaatgaggcaggaaggtgaaatcgacgcctgaatgtgccgggcacaataaaaaaccgctgaaaatcagcggttttttgtttttaacaacctgaagtgcgggcccgcttagcggtgcgcgagctccgcgtcctcttcgctatcgagaatagctttatcggtttgacgcagccactggctggtcagggtaccggcggtcatggaaccgcttacgttcagcgcggtacggcccatatcaatcagcggctcaaccgagatcagcagcgccaccagcgtgaccggcaggcccatcgccggcaggacgatcagggcggcaaaggtcgcgccgccgcccacgcccgcgaccccggcggaactaacggtcacgatgcccaccagcgtcgcaatccacagcggatcgagcgggttaataccgacggtaggggcgaccatcacggcgagcatcgccggatagaggcccgcgcagccgttctgcccgatcgtggcgccgaacgatgcggagaagctggcgatagactccggcacgcccaggcgacgcgtttgcgcttccacgttcagcggaatagacgccgcgctggagcggctggtaaaggcgaaggtcaataccggccagactttacggaagtacttcagaggactcacgccgttgaccgccagcagcagaccgtgcaccacgaacatgatgcccagaccaatataggaggcgataacgaagctgccgagcttgatgatgtcctgcaggttagagcccgcgaccaccttggtcatcagcgccagcacgccgtacggcgttaactgcataaccaggcgcaccagcttcattacccaactctgcagcgtgtcgatggcggtgagtacgcgctggcctttggcgacgtcatctttcagcaatttcagcgccgcgacgccgaggaacgcggcgaagataaccacgctgataatcgacgttgggttcgcgccggtcagatcggcaaacgggtttttcggtacgaaagagaggatcagctgcgggacgctcaggtcggcgactttaccggcgtaattgctctgaatggcgttgaggcgggcggtctcagcgctgccctgaaccagcccttcggcggtcaggccaaacatattagtgaccagcaccccgaccagcgccgcaatcagcgtggtgaacagcagggttccaatactgaggaagctgattttacccagctgcgaggcattatgcagacgggcgaccgcgctcagaatggaggcgaaaaccagcggcatgacgatcatttgcagcagttgaacatagccgttaccgacgatattgaaccactggatagaatccttcagcaccgggctgtcggaaccatagataagctgtagcgccaggccgaagacaacgccgatcgccagaccgaccagcacttttttagcgaggctccactgtttatggcgggtttgggccagcgccaacagtaaaaccgcgaacacgactacgttcgctattaatggaaagttcatccccgttctcctgatatcttttattaccgggttggtcaataaccaactcttatgacggcaagggtagcagaaggcgttattcgttacttatattcaaatggaattgattataaccaattgaataattcgctggtttatcgtccaacctggtggctaattaagcgattaaaggtggtttgcaaagaattaatcatgtccgatgaccagcgaatggcgctgttttcggcaacgttttgcggcatccatacggcatagataaacagcgccatacacagcgcgcgctccagctggttacccttgcgcggtgcaagcaggggcaggcgaaaacgccagcggcagggccagagcagcggaacgcctgccggggtgagcatgtcggcgagaatatggctgaggtagccaagaaccaggccctgaaccgcgtctgccggcactatccagctttccggtactttcaatgagaaaatcgcgaccgcgccaaagactaccagcaggctatgggtgaagccgcgatggccaaaggcgcgcgctatcggttttgatatccagcttaatcgctgaccgagaaacgacttagggtgatcgatatccggcagcagacaggtcaggatggcggaaggaacgatgtgccaccagtcgccctgagccagcacgggggtcaattccgcgtttttcgcaaataccgcacaggcgatagagaagaggaggtggccttccgccgtcatgataaacaccctaaactgtcaattcatacagtatagggtttttatacagtgtgcggaagaggtgacggtgtaactctttgtcacaaaaacatcagcgtgccagccagccgccatctaccgccagcgtaaagccgctaatgtaatccgccgcccgggaggcgagaaaaaccaccggcccctgaaggtcatccggcacgccccagcgcccggccggaatacgatcgagaatcgctttgctgcgctcggcgtcttcacgcagttgctgagtattattggtagccatgtatcccggggcaatggcgttaacgttgatgcgatgccccgcccattcgttggccatcaggcgggtaatgcccagtacgccgctttttgacgcggtgtaggagggtacccgaatccccccctgaaaggagagcattgaggcaatgttaacaattttcccgccgtcaccttgctgaataaactgcctggcgaccgcctgtgaaagaaagaacaccgacttcagattcaggttaatcacctcgtcccagtctttttcgctaaaggagagcgcatcggcgcggcggatggttcccgcattgttgaccagaatatctacccggcccatggcggccacggcccgatcgacaatggtttcaatctcatcctgccggctcagatcggcctgaatagcggtaaagcgtcggcccagcgcctgaaccttctctgcggtttcatgggggatccggcgattcacgccgacgatatcgcacccggcctgcgcaaggcccagcgtcattccctggcccagcccggtatcacaacccgtcacgatagcgaccttgcccgtaaggtcaaaggcgttcagtaccatatgcacctctgtatgctgatttcacgcgttaaataacgccgttgagacaagcatagagggcgggagaagaaaaaacaaataaaaatgaaacgctgttttaattttgtgatgatgagacggtgccgctatctcatcatcagcggcaggattaaccgagcaggtcgctcagggtgagggattcaagggtggcaagcttcacgtccgccagcacgaagcgcggatcgcggctgttttccgcttccggtacgacgatagatcgcattcgggccgctttgctggcaatcatgccgttaaccgagtcttccagcgccacgcagtgcatcgggctggcgccgagtctggcggcgcagtccagatagacctgcgggtgcggtttgctgaacggcagcccttcggcggaagcgagggcgtcaaattgatcgcgcagttcaaacatggtgaggactttttccagcatccgcagcggcgaagccgacgccaggccgattttcaacccctgggctttgcacatcgccaccgcttcccgcgcaccggggaggagcggacgcgcttcttccaccagctggatggcgcggttgatgatccgcgcggtgacttcggcacgatccgggcctttccacggctgctgggcaaaccacagatcgacgactaaatcgatgcgcagccccaggatatcgggcatttcatggcggcggctgatatccaccccgaggcttgccatcacctccagctccgctttatcccacagcggctcagaatcaatcagtaaaccatccatatcaaaaatcgcggcgtgaatctggcgcctggctgacataagtccctctcctgtagcgtaagtagataacgaatcggcactcatggtatatcataccgcgcattattgggcgaaattcgccgacgaaggtagacttagggtagacaggcgtcttaacaaggggaacccatgacgtatcaacaagctggacgcgttgcagtacttaaacgtattttggggtgggtggtatttatcccggcggttatctcgacgctgatttccgtactgaagtttatgtacgagcacagtgagaaaaaaccgggcattgacgcggtgatgatggactttgctcatgtgatgattgagatgatgcgtttcaatacgccgttcctgaatttcttctggtacaactcgccgctgccggactttaagcacggtatgaatatcggcttctgggttatctatattctggtgttcgtcggcatggcgctacaggcctccggagcgcggatggggcgccaggcgaagtttctgcgcgagggcgttgaggatcagctgattctggagcaggcgaaaggggccgaagggctgacgcgcgaacaaatctctgaacgcgttgtggtgccgcgccataccatcctggtgcagtattttccgctatacgtcctgccggttattattatcgtgctgggctacttcttcttctctttactcggcgttctgtaaaggaccggcccggaagcgccgggccggcagaatcactgggcgggaagggcgcgcggtttaccctcattatctaccgcgacgtagataaacagcgcttcggttgctttgtagcgctggccgatgggttcagacgacaccttcttgacccacacttccatattgatggttatcgacgtattgccgcgcttcacgcagttggcgtagcagcacaccacgtcgccgaccgcgaccgggcgtaaaaaagtcatgccgtcgacgcgcacggtcacgacgcgaccgtgggcaatctctttggccataatcgccccgccaatatccatctgcgacatcagccagccgccgaaaatatcgccgttagcgttggtgtccgccggcatcgccagggtgcgtaataccaattcgcccttcggcgtaagatctgttgttgtcattctatactctgtactagtcaaagatgatcaggcggatgctactatgaaaatgacgctgagagaatagggaatacgcccgcgatagcgggcgtgaggggttagaaggagatcgtgacgccagcgtaataggcgcgacccggttcgttataggtcgaagccccttcgttttcacgataaatttgcttatcgaacaggttactgatcccggcgttcaggcgcagatctttcattagctgatagttgccgccgataccaaccactgaataggagcccacttcattggtggccagcacgccgttttcagtacgaatttccgcatattcccgcggtttctgccgaccgtacagagtccagttgacgttcgccgaaaacttgctggtcacctgccagtcgagcagggtattgatggtgtatttcggaataacggacagcgggtttccggtatctttgttttccgatttgatcatataagtggcattggtgcgccagctgagcgtatcggcaatgaccggaaccagcagcgtgccttcaaggccttcgacgaccgctttcccgccgttctcccactgcaggatattcgctccggtcgcggtattacccagtatctctgtgccggagacgatcttgtttttgtagtcgttgcgaaaccaggtgacgccggcgttgtaaccgttcaggttaaactcaaggccaatctccttattgatgctgatttccggatcgaggtccgggttacccaacagatagcagttgccatcggcaatacttatcgggcagccgttaccccgcgtagaaagcagatagccttcgctcgactgatacaggttcggcgctttaaatacccgggcgatgcccgctttgaccttaaacatatcgcccagatcctgcgccaggttcaggctcgggctccagttgctgccgaagtcgttatgatagtcgaagcgcagacccgggataatattggtgcccggcatcgcttcaatattgtcttccagatagataccggtcagggtggcgctgtttttagggctgcgttgtgaaggatcgccagaaatcccggggagagcatccgtggtggtggtggcctgcatggacgccggatcgtttagctcatcgcgattccattccatgcccagagtcagggtctgttcagcgagccagttgaaggggagattcacctctgcggttgagcgccacgactccaggcggctggtgtcatagacatcgctgttgatcatcccttcaacgcggccggtggtgccctcctgcaggcgggtattgttggttttttcgtagtagacgcccgccttcgactggccccagtcccagatcccgttgtaggtcaggccccaggtctgccgatatagccggttggtttcctgaccgtacagcgtatccaccaggccatttgggctcatattgctgttgctgtactgcgtatcgccggcataaatattgccctggcggctataggcgtagctaaaatccaggatctgctgcggggtaactttccacgacagcagggcgttaatatctttgttgcgtaccccttcgcggcccgccgcgtaagagccattttgcgcgcggttaatatcccaggcatcgggctccgttttgttgatgttgccgtacaaacgcatggtcagggcatctcccgccagcggtccgttgaggctgaagttagcccggttggtggcgccttctttattattttccggctgattggtatacagcgaaagcgagccgtgccagtcgttggtggggcgcttggtgatgatattgacaacgccgcccgcggcgcctgagccgtagcgcgctgcggcagggccgcgcagaacttcaatgcgttccaccatttccggcggtacccagttgctgtcgccgcgggtatcgcgctcgccgcgccagctatagcgcactgaattgcgggaggtgacgggcacgccgtcgataagaatcagcgtgttttccggtcccattccgcgaatgtcgatctgacggttgttgccgcggctgccgctggcgctgttgccggtcaggttgacgccgggcattttacggatgatttctgagagatcgttaaccgggggatctttagcaatatcttccgcagtgatgatcgagacgcccggctgctgcttcagcgcctcttcggcggtgccatgaaccaccatggtctccgtatcctgttccacctcttcggcgaagacccctgggctgagtaagcctgcaatggccagggccaggggcgttgctatgtgatttttctgcgttctcattataaatatccatatcaaatcatgaaaaaattgagatcgagaatatcaatgataatcattatcgtttcaataaagagacgctaatctccattaaatcctcacaattgccgcaactttccgacatgtggtagatatcatgaagaaaccggcgagcctgaaccctccggtttccgggcgcgttcgtcaggaggtgggggtttcgttgtcggttttttgacggcgtgtttgcgattggtaccacgccgggagctcagccagtctgatgccggtcgggacatagctttgtttcaggcaggctatgcgctgggaacgataaataccggtatagcccgagaccagccatgccaccacgcaggccagcgccgcgtaaacaccgatttccgcgccaaatagctcaatcgccatcagcgtcgaggcgatgggggtattcgccgcgccggcaaagacggcgacaaaacctatcccggccagaaaacctggcggcatatgcagcagcggcgccagcgcattgcccagcgtcgcgccgacgtaaaacagcggggtgacttcgccacctttaaatccgctgcctaaagagacaacggtgaagatcagtttgccgaagcagtcccacggcgccagcggatgctggaaagcgtccactatcaccggtatgcccaggccaatatagcgctctccgtgcagcagccagacggcgccggcaatcgccagtccgccaataaacggccgcagcggcgcgtagtgaatccgttttttcatgaaggcgccgaccgcatgcgtgctgtcggcgaaaatgcgcgccgcgaggccaaagcagcagccggcgataatgatggccagcagcgtccagagcgtcagcgtgggaaagccggtaataaagtagtgcgtatgctgcaccccccacatgatgccgacccgatcggcgataatcgcggcaaacagacagggaagaatggcgctgtagtccatccgtccgatagccaggacctcgagcccgaatagcgctccggcgagcggggtaccgaaaaccgaagagaaaccggcgctgatcccggccatcagtatcattcgccgggcatcgtcgttaaggcggaaaagggccgtaaaacggtcggcaatcgaggcacccatctgcaccgccgtgccttcacgcccgacggaggcgccaaacagatgagaaacaacggtaccaaaaaagaccagcggcgccatgcgcaagggaatgacgcgctgagggtcgtgaatctcttccagaatcaggttattgccggcctccacgcgggtgccgtagcgcaggtagatccaaccgacggcaaaaccggccaacggcaggagcccgataagccagcggtgagcttcacgcgttgccgtggtccactgcagtgagaaaagaaaaaacgccgatgccgtacccgccagcaccgcgatgataaaggcgaggagcagccattttccgaggaagaaaagcagagagagtgatgaaaagcggtttgcacgcatcgtcagttccttagaagattaaccttcccggacgcggtgcctgcaattcagatatgcctgcccattcccggtccgggaataaaaagcaggcatcattagccacatggcggttcaaggaggaatgccatctcctgtgagaaatagcttacattacgaatcgtttcagctgaagcgatttatgcggagaggggaaaagcgaagaacgcggcacgccgtccggcgtgccgtgggaaagccagcttagtggttgtcgtcctgcggcatatggcgatagatatacacgccgctcagcagggtgaataccagcgtcagggcggtcaaaccaaagaccttgaagttgacccagatattctgcggcagccagaaagcgatatagatattcgccagtccgcaaaggatgaaaaacaccgcccaggcaagattcagacgcgaccatacctgctgcggcagcgtcagctctttacccagcatgcgctggatcagcggcttcttcatcacccactggctaaacagcagcgcgctggcaaacagcacgtagataaccgtcaccttccatttaataaactcatcgttatggaagaagatggttaagccgccaaatacggccaccagcacaaaggtaatcagcgccattttctcgactttacgatagcgcacccagctgtaaatcagcacgatggcggtagcgataatcagcgcggtcgtcgcggcgtagatatcataaagcttgtagaatgcgaagaagactaccagcggtaaaaaatccagaaactgcttcatacatcgattccgtcgttcaggttggggcagggagcacccgccccggattaggttagttacgaatgagcatatacaagcgaaataaatagatcagcaacaatgcggagataagattgctgagggtatttattaccaccgcgccaacgtttggcgtcaggaccgcgaagctggaggcaaacagcagcagcagcgttttcgccagcagccagccgataatggccggcgccaccagacgtacgttggcccaggccagacgcatactgctacgcatggcgctgaaaatccccattttatcctgcaccagcataaccggtgcgaaagagagcacgatagccagcaggacgcccggcaccaccaccagcatcattcccatctgcacgataaacgtcgtcagcaggatcagcagcagcagctttggcagcaccggcgcagaagcgccgatcgcgcgcagggcgctgactcgctggccggcggagatcatctgaatcatgagcagaatgccgccggcaagaatggcgttacctaccagccctgagaaggtggaggccgcagacgcgcgcagcaggatttgctgctgctccggcgtcatgctctggaccagttcgaacagcccgccgctacccgccaggctatcgccctggctcagtattgacagctgctcttcactgggtgaaaaggcatggccaagtactaccgtaatgaacgcgcatagcagcgcaatcagcaggatagtaacgaactgattgcggaaaaagttcccggtgtcacggtagacggacttcgccgtgatagacatgcattctccttgagtattgcaggtgttaactagccggcgattgtaccgcaaatcgcggctgggtagcagtctctgctcctgcacgctaagtatatctttgtaaatagaagaggaaatcagcgacgcgctgccttgagtgtcataaaggaagaaatttgatatgacacgcttctcactgattgtattgagaaagtgaaaattaatctggatcaataaatgttaaatttgcccacttaatgtgatctatgttggatcaaacatacttcaatgtaggtatattctggcgctgaataaccataatgaggaagtgggtatgaaaaagttagcagcggcggttgttattctgagcagtctttccggcagcagcgtctgggcgcatgaagccggtgaattttttattcgcgcgggttcggcaacggtcagaccgaccgaaggcgcgggcggcacgttaggcagcctggggggctttaacgtcagcaataatacgcaactgggtttgacgttcacctatatggcaacggataacatcggcgttgaactgctggccgccacgccgttccgccataaagtcgggaccgcggcaaccggcaatattgcgaccgttcaccatttaccgccgacgctcatggcgcagtggtattttggcgactccagcagcaagctccgtccatacattggcgcgggtatcaactacacgaccttcttcgatgaaagcgtgaacgatacgggtaaaaagaccggcatatccgatctgagcctgaaagactcctggggggcggcaggacaggtggggatggactatctgattaaccgcgactggctgattaacatgtcggtgtggtacatggatatcgacaccaccgccaactataagctggcgggcgcgcagcagcacgacagcatccgtctggatccgtgggtgtttatgttctctgcgggataccggttctaaagtctcaggtaaagctggtcgcaatgaccagctttattgcacatcccaacgcgaagtccgctgccgcgattgccgatgcgtcatttgccgcaatcattccgcggaacgtccgcgtcaaccgctactcattaccccatttattcaggaataccgcgatatcatcgatgcgctgccgatcgatgcccgcttgtatggccatctctccctgcgcctcctcgctgatttcttcgttattcatcagccgcgtaatcagcagttgaaaatagcgcgccaggggctcacgttctgactcgctgacgggctcggcggactccgtcgaatactcatccgcaatgtcgtaatatttcagtggtacttcctcgtgcataaatcgctcccggttgacgttgtgcctgcattttctggcttgaatagtatcacccctgcctggctttagctcaggaacgcccagaaaaacgtatgactagcccacactatgcgcaacgggagggtaacgccccgctatcgaggcgtaaggatgttcgtgcgacatgcgctggcctttattaaggctattggtacggttgttccgtttggagcgttattaaacatctggtttctaatgctatgttatttgagctgcacgtttaatgagaaaactcttgccgcgacaccatcaattctgaaataaaagcaaatggcttgttggaataatacgccgtgctctatgatgcctctgcctgtaaatgtcttttcttttatatccagggtgccttatgagtaatttacttcttttatttatctccatcttgctattggttatttccgtatacaatggtgtggcttattttaatgagatcagaagacgacgtaatgtgtttcgttgtttttatacttctgacgatcgtgacgctaggtcataaactgttttcttttctctagcacgtttagaaacttattaagatcggtattgctttcaatcttaaagtcatgcatgacatttttcttgtgagaatacactgttttatagttaatgttcaatttattcgcgatttccagctggttaagcccaagactcagggcatgaacgacctttgactgcgcctgggtcagcgatttacagggacagttaatgcagcggctagtctgcgggcgatatcctgtttcattgtccgtccaggtgaatgcataaacatgaacttttattttatttcttatcgccggaagcgaatcacctttatataaaaacaaacaatctttagtacagttggggagttcattttccgaacattgattttccctttcctgaagaataaatagtaagcttttcgtggttttatatttcaattcatcatggcataaaaatatttctccgggtgccatttcggtgaatatgatctgagcctctgcgatgttaccgggggtgtagctatctacaaaaatgaggttttcctcatgggctacgctttcctgcatcagctgcttgatggcatatcgggtgtagatgtttttggtattgattaaaatggttatcataaataaagattcacatgcttatgaataaataaatcagaattaaaatagtgtcagtgcctgataatggccgtacgtaaaactaagaggtctaacggtaatgagtggtttaacaaactgcaaataagatattgtagaggtttttaaaaagcaatatttctatagaaaatgagaattcagatatttttcatgggaaaaatcttatctttcaaatagatagtgagcctttttgagttttttaactgagatcgtttttatttatttttgtcgtgcacgaaaagcttagtgtccgtattgctttactggtaagattttggctgaggatgaactggtcagggtattcttaaaggtaatgaaacgggcaatttttaatgaggtggtggagtggattgaatcccgcctgacaatcaatccggccgttgatgatatcgcctgtggggttgggtattcccggcgttttgtttataacctgttccatgagcatgccggccttcccgtcgggaaatatattcgcatgcgcagaatgacgcttgccgccggtaagctaaagctgactcagcaatcaatttcatcgattgcctgtttactgcactttgattctcatcaaaccttttcccgtgagtttaaaaaaacctttggccttagtcccggagcgtatcgggattcgacctgttgggatatgtcgttactttatcagaaggtggcaccgcagggcggcggcgtaccggcaccttacctttgttttcttgaaggacagtcgtttgctggatatggattcaactatacgctatctctgactgatgatatcgctacgcgaaaagaggtcacccggagaaaaattgccggcggcgcgacaggcgcagaccgcgatatctacattctctctgcatgttcccccgctgcgcacaatatatataaaacagcgatcaatgcattcatcggcacaccgtttaattcgcgggcggcttcttttcgtgaggtacgggtcgctaaacgtgggctataccttggtcttgaatttagtggctcatgggaagactttatttttctttcgaatcatgtctatctgaaataccttcctgaactgggtctgtatcgacgtgaaggttatgatatcgaacgttttgtccctcaggaaaatattcctttaggaaacgaccgacccatttacactctgcattattatgtcccggtcggttatatttagaagatggcagctttgcccagtaaaaagcgaaaattgactgccatgaacccgtctgcaggccattaatacgcatagacttatcaccacggcacgcgacatccgcgataatccagatactctaatccgggacgattttgtttttccagcagcacgttcaccagcgaggggatggtctccgccatggtgagcggggcgctctcgccgccaagagccgtgcggatccaccccggcgccatgaccaccatcggatgcgatacgctggcagggcgggcggcaaagctgcgcataaacatattcagcgcggctttgctcccgcgatacagctcgcgctgcccgccggtattattgctcaaactgccttgtcctgaagacataacgccaatcagcccctgcggcagcaccagcgcctgcagattttctataacccgcatcggcgcgagcgcgttggtcagcatgacgtgaataaactcttccgtcgcgatctcgccgatggtttgtgtgggatcgcggttggtggtgcccgcgttgacgaacagcatatccagcacgctatcggcaagcgcattgcgcagcgccgcgatcccgtcgctatcacaaatatccagcgcctcaatgcgcacccgtccaggataagcctcggccagatgatgcagcggcgtcgtttgtgagagatcgcgtacggtgccgatgacctgccagccatgcagcagaaactgttcagccatggcgtgcccaagcccgcgtgacgcgcctgcgatcaatactgttttaggggaagtgaccatgggcataactcctgagtaaatacatgatggggtaaatataggctggtgctgtagcaggcggaaggcgcagcatttgcaataataaagtgcatcagacgccttatcctggagtggagaaaaaatgaccgatcctgatttcaatttactggcggcgctggatgtattgttgagcgagaaaagcgttgccggggcggctaaacggcttgagctcagcgcttcggcgatgagccgcacgctgacgcgcctacggcaggtcaccggcgacccgctactggtcagagccgggcgaaacatggtgctgactccgcacgcagaaagtctgcaggcgcgggcaaaaaacgttgtctccgagatgcgcgcggtgctcgaggcttcgcctgcgccgctgagtttatcgaccctcgagaagcgatttactttgcgtaccaatgagggatttatagaagcttttggcccggcgctggtgaacgcggccgcgcgggaagcaccgggcgtgacgctggagtttgtcgctaagccggagaaagatgcccgatttttacgcgaggggcgggtggacctggaaattggcgtactgaaaaatatggggccggagatccgcctgcaggcgctgtttcgcgatcgttttgtcgtcgcgctggccaaaaaccatccgctggccgcctttgccgatatgtcgcgagaacaatttgtttccgtggggcacgtcattacctcccgtcgcgggttgatacgcgggccggttgatgatgcgctggcggcgtgtggcatgcgccgcaggattgccgcggtggtgcctggtttttccgccgcgctggccgtggcccgggattctcagctcatcgccgttgtcccggcctcctgcctgcagagcgcggcgggaaaagagatggtcgcttttcctctcccggtgagtacgccggagataacggtgtcacaaatgtggcatcctcgccaggagcatgaatcggcacatcgctggctaaggcagctggtgcgcagagtgtgtcgacaaccataaaaaaagcccgcacaggtgcgggcaaaaatactggaagcaatgtgagcaatgtcgtaccgaatacctgagctgtttgctcaactattcagtaatgagaaagataatatttctcatttaagatatcaaccccaacttttgtgcagaagcgatttttttaatcgacgacaaagacggtgcgtttctggctgtcgtcctgcggccacgccgtggcgacctcgcgaagcggccggggagtcgtggcgatagtcaatccgccggcgacggcggcctgcagcatctccccggtggcggccagcagctggggcacagaaaggctgccaattccgctgcccatcagctgcagcggcgaggatcgtagcaccgcgccattgagagagatatcggcggcggaaagggcaggtgaagaagctggaagcgcagcagctggtactcaagcagcccaatgcaaaagatcgccggattagcgaggtgacgctcagcgaagcggggcaggcgatgatcgatcgtatcgcgggagcaagaacgcggctgatgaatgaggtgctggccggatggacgcaagaagaggtgatggcgctgtttcgcctgacgcgtaaatacgccgacagcttacagctgaaataaccgcccggcccggggccggacggcaggtacgttaagccgctttagtggcggctttcaggcttcgggcgaaagccttgagttccgccagcatggcctgcggatcattcacgttccgttcgatgattttgacgatggctgagccggaaatcgcgccggccgcgccggcctcaatcgcggcggtaacctgctccggcgccgagatgccaaagccctgcagcggcggcgcggcgtggtactcggccagcttttcaatcagatgatgcagcggcagcgcggcgcggttttccgcgccggtcacgcccgcccgcgacagcaggtaagtataaccgcgaccgtaagaggctatctggcgcagcagatcgtcatcggcattgggcgggcagatgaaaatcggcgcgatattgtggcgcagcgcggcctggcggaacggcgcggactcttccacgggaacatcggcaaccagcacggaatcgacgcccgcgcgttcacacgcggcgtagaattcatcgatgccggggctgaacaccaggttggcgtacatcagcaggccgataggaatggtagggtgtttctggcgaatcgccgtcagcatttcgaagcactgcgcgggggtcaccccggcggcaaaagcgcgcagggtggcgtcctgaatggtcgggccatccgccagcgggtcggagaaaggaatgcccagctccagcgcgtcggcaccggcttcaatcagcgtatcgataattttcagcgactgttccggattcggatcgccgagggtgacgaagggaacaaacgcgccttcccggcgagctttcagttgtgcaaacagcgtctcataacgttccatcagatttcccctcgcgcttttaaaatatcatgtacggtgaagatgtctttatcgccgcggccggagaggttaaccaccagcagctgctctttttccgggttttcacgcatcattttcagcgcgtgcgccagggcgtgggaggattccagcgccgggataatcccttcatggcgtgatagctctttaaaggcctccagcgcttcgtcatcggtaatcgacacgtaatcggcgcggccaatgctgtttaaataagcatgctgcgggccgactgacgggaaatcgagcccggcggagatggagtaggactcctcaatctggccttcttcggtttgcatcatcggcgatttcataccgaagtagatgcccacacgaccgtgcttaagcggcgcgccgtgctcgccggactcaataccgtgacctgccggctccacgccaatcaggccaacagcggtttcgtcgataaaatcggcgaacatgccgatagcgttcgatccgccgccgacgcaggcgataaccgcatccggcaggcgaccttctttctcgaggatctgcgctttggtctcttcgccaatcatgcgctggaattcacgcacaatggtcgggaacgggtgcggacccgcggcggtgccgagcatatagtgggctttttcgtagctgccggaccagtcgcgcagggcctcgttgcaggcatctttcagcgtagaagagccgctatgaaccgggatcacttccgcccccatcaggcgcatgcggaaaacgttcggcgactggcgttcgatatccttcgcgcccatatagatgcggcacttcaggccgagcagggcgctggcgagggcagaggccacgccgtgctgaccggcgccggtttcggcgataatttccgttttgcccatccgtttcgccagcagagcctggccgagcacctggttagttttatgcgcaccgccgtgcagcaggtcttcacgtttcagatacagcgtcgtgcgggtgccttcagtgaggttgcggcatttggtcagcgccgtcggacgaccggcgtagtttttcagcaggtcggtaaattcggcctggaatgccggatctttttgcgcgctgacgaaggcttcttccagctggcgcagggcgggcatcaggatctgcggaacgtacatcccgccgaattcgccaaagtaggggttcagtaaagtactcattattgctccttaatatgcgcgcagcgtttgaaacacagaggacagcttgtcggcatctttaatacccggctgcgactctacgcctgaattaaaatcgagtccggcacagccgcttttggcggcttctacgcagttatcggcgctgaggccgcctgccagcatgacgttatgcaggtcctggccctgcagcagggaccagtcgaaacgctggccggtgccgccctgaccgttgtcgagaacgtatttatcgacatggcgcagctcgcgcggcggtagcgtttcacctacgctgagggctttccagatttgcaccttcggcggaagttcggcgcgcagggtatcaatataggtctggtcttcgctgccgtgcagctgtacggcggctaagtcgaggttttccgcccgggcgatcacttccgccatcggggtattgcggaatatgccgacatagctcagaggcgcgctggcgatcaccgcttgcgcctgcgcctcgttcaccgcgcgcggcgacgtcgggacaaaaatcaggccgccgtagaccgcgccggattcatacgccacctgggcatcctgggggcgggtcaggccgcagaccttattctcgccgagcagcacgcgcttcacggcggcgttgagatcggcgtgctccatcagcgctgagccaatcaggaaaccgttggcgaagtggctcagttcgcgcacttccgcgtaggtatggatgccggactcgctgatcaccgtgacatcgtgaccgagcttaggcgccagggtacgggtacggttgagatcaatcgacatatcgcgcagatcgcggttgttgatgccgactactttcgccttcagcgcaatcgcgcgctccagctcctcttcattactcacttcggtcagcacgcccatgttcaggctgtgcgcgacggcggagagctggcgatactgctcatcatccagcactgaaagcatcagcagacaggcgtcggcctggtagtagcgcgccaggtaaatctgataaggatcgatggtgaagtccttacagagaatcggctgcggcgcgaccttactgaccatcggcaggaaatcgaagctgccctggaaatatttctcatcgcacagcaccgagatagccgaggcgtagtgcttgtagacgccggcgatggccgccgggtcaaaatcttcgcgaatcaggccttttgatggcgaggcctttttgcactcgagaataaacgcggtgcgggttccggcgagggcatcataaaaattgcgctgcgtcggtaccacttcattttgaaaactggctaacggttgttgttgtttgcgggcttctacccaaatcgctttgtcggccacgatttttgctaaaacggtctgcattttttaccctcttgccgctaatgcggtcactctgtcataggccgctccgctatgcagcacatcgatgacttgctgcgcgttggccttcaggtcttcgtgtccatgtaaacgcatcaacatggcgacgttggcggcaacggcggcttcgtgagcggcttcacctttaccttgtagcaagcgcgtaagaatgtcacggttttcttccggcgtgccgcctgccagctgctcctgatggtaaggcgtcaggccaaagtcggcggcggtgagctggtagctcttgatttcgccatggttcagttccgcgaccaccgtcggcgcgtgcagcgacacttcatccataccgccgctatgcaccaccgcggcgcgctggtagcccagcacgcgcagggtttccgcaatcggcagcaccagttccgggctatagacgccaatcagcgccagcggcggatgagccgggttgatcagcggcccaagcacgttaaacagggtgcgggttttaagctgctgacggaccggcatcgcgtggcggaaaccggtgtggtacttcggtgcgaacaggaagcaaacgcccagttcatccagcgcctggcgagatttatcggcattcatatccaggttgataccgaacgccgccagcaggtcggaagaaccggatttactcgatacgctgcggttaccgtgcttcgcgaccttcaggccgcaggcggcggccacaaacgcgctggcggtcgaaatattgatactgttgctgccgtcgccgccggtaccgacgatgtcggcaaacggataatccggccgcgggaacggcgcggcgttttccagcagcgcggtggcggcgccggcgatttcctgcggatgctcaccacgtactttcatgctcaccagcgcggcggccagctgctcgggtttgacttcaccgcgcaccaccgcagagaacagctgatggctctcctgctggctcagggtttcggcctggtacagtttttccagaatcggctggagggtgttggtctgctccagcttctgcagcgcccaggccagggtttgctccagcaggcgtgccccctgggtggtcagaattgactcagggtggaactggaagccgcagacgcgatccgcgtcgtgacgcaccgccatcaccataccgttgaagtgggcgttgatggtgagtccggccgggatattgctgcccaccagcgagtggtagcgggcgaccggcagcggattgctcagtccggcaaacatcgcctggccatcgtgctcaatgcttgacgccttcccgtgaagaatttcaccggcctgaccgacgtagccgccgtaggcttcgacaatcgcctgatggccgaggcagataccgataatcggcagcttgccgcgcatgcgggtcagcagctccggcatgcagcccgcttcgctcggcgtccccggccccggagaaagcatcagtaccgggtttttcatggtgccgatgcgctcaatcagcgcctgcgccgggacggagttgcggtaaatcaccacgttatggccgttcgaacgcagctggtctgccaggttataggtaaaagagtcgatattatcgagcagcagaatgtcggccattagaaaatctccttcgcgtggtgggcctgggcgatagcgcgcagcaccgcgcgagctttattacgggtttcatccgcttctgactggggaacggagtcgagcacgataccggcgccggcctgcaccgtggcgatgccatcctgcacgtaggcggagcggatcacgatgcaggtatcgaggtcgccgtgggcggtaaagtagcccaccgcgccgccgtagctgccgcggcgtttgccttcagcggcggcgataagctgcatggcgcgcactttcggcgccccgctgagggtgcccatattcatacaggcgcggtaggcatgcagcacgtcaagatcgcggcgcagctcgccaaccacgcgggagacgaggtgcatcacaaaggagtagcggtcgactttggtcaggtcggcgacgtagcggctacccggggtacagatgcgcgcgaggtcgttacgcgcaaggtcgaccagcatcagatgctcggagagctctttatggtcggtgcgcatctccagctcaatgcggctgtcgagatcgcgatccagcgaaccatccgcgcggcggccgcgcgggcgggtaccggcaatgggatagatttcaatctggcgattggtggcatcgtacttgagagaactctccggcgacgcgccgaagagagtgaaatcgttgtcctgcataaagaacatgtacgggctcgggttgctcttcttcagcacatcataagcggccagcggcgacgggcagggcagcgagaagcggcgcgacggcacgacctgaaaaatctcgcccgcgcggatggcgcgctgcattttacgcacgacggcgccgtactcttcgtcgctctgatcgcagtcgcagctcatttcggcaaccgtggtcaccggcagcggcgccggcggctcgtttagctgctgacgaagctgagcgagccgctgtagcagacgctgtttttcgctttccagcggcgtgaacaggctcgcctggatacgggtatttttggtctgatggtcgataaccagcagcgtttccgccagatagaagcagtaatccgggcaggcggtgtcgctctccagcggcggcaggtcttcaaagccagcgaccaggtcataggcgaacaggccgccgaagaacatcgcttcgcgctcctcctgcgggacggttatcagatcctgcagcaggcgaaaagcgtcgaataccgagaatgaacacaggcgggcatcttcatccaacagcgcgctgaccggcgggaaggttaatacccggctatttggttgacgctggttatcgatgccggatggcagcgcgctatccagcagttcgagtaacgccgtaccgttggcggaaaacgcgtgaatggtgacagtgtcacctagcgcggtaatgcgcagcgcgctatccaccagcagcaggctctttaaatcatccttactgtcgatatccgcggattccagcagcagggtggctggacgcgcgccgcatagctggtggaacagcgccgtggggttttcccgatagatggcgtcgctggtgagaagctcgagtgccggttttgatgtttgcattattgttgtcgcctgttcgctataataatttgtccaataaaaagcccgctcattggcgggccgggtatctgtatgctgagtgcaaaacgcgatcacgccgcccgataacaggaggtgcgccaccagccgtgcagagtgatgaattgcgttttcattgttgataccccttcatgtgaacttgcgtactagttaactagtccgagggattaaagtcaacccctgtttgcagattttctctatcagtcggtatgatgatgcgcttattactatccttaatcacttaagctgcagaaccacagtcaatctgcctgtgacttaaagtatgacgggtaccggttcatgtccagcaggagtcatcttgagcaacaccaattacgcagtgatttacgacctgcacagccataccatcgcctctgacgggcgtctgactccagaagaacttgtccatcgcgcccaccagatgcgcgtcggcaccctggcgattaccgaccacgataccgtggcggcaattcccgcggctcagcgtgaaattgaacgtgccggtttaccgttggcgctgattaccggggtggaaatttccacgctgtgggaaaatcatgaaattcatattgtcgggctgaatatcgatatccatcatccggcgatgaccgcgctgctcgatgaacagaaagcgcgtcgccagatgcggggtcagcagatcgccgagcggctggaaaaagcgcggatccctggcgcctgggaaggggcgctgaagctggcggacggcggtgcggtgacgcgcggccattttgcccgttttctggtggaggccggctatgccaacaatatggctgacgtatttaagaagtatctggcgcgcgggaaaaccggttacgttccgcctcagtggtgtacaataaaacaagcgattgatgtcattcatcattctggcggtaaagcggtcattgcccatcccgggcgctacgatctctccgccaagtggttaaaacggctgttggcccattttagcgagcaggggggcgatgcgatggaggtggcgcagtgtcagcaggcgcctcacgagcgcgcacagcttgccgcttacgccgtgcagtatggcctggatgcctcgcaggggtctgattttcatcagccctgcccgtggatcgaactgggccgcaaactttggctacccgcgggcgtggaagggatctggcgcagttgggaagtggccgtagaacaaaattgagagggaagtatgagccagtttttttatatccatccggaaaatccacaggcgcggttaattaaccaggcggtggacattgtgcgtaaaggcggggtcatcgtctatccgaccgactccggctacgcgttaggctgcaaaattgaagataaaggcgcgatggagaggatttgccggatccgtaatctgccaaacggccacaacttcaccctgatgtgccgcgatttgtccgaactgtcgacctattcattcgttgataacgtggcctttcgtctgattaaaaacaataccccgggtaactacacgtttatcctcaagggcaccaaagaagttccgcgccgtctgctgcaggataagcgtaagaccatcggtatgcgcgtgccgtccaacccgattgcgcaaatgctgctggaaacgttgggcgagccgatgctctccacttcgttgatgctgccgggaagcgactttaccgaatccgacccggaagagatcaaagatcgtctggagaagcaggttgacctgattattcacggcggctatctgggccagcagccgaccacggttatcgacctcactgaagatgcgccggttgtggtgcgtgaaggcgtgggggacgtaacgccgttcctgtaatgacgtctgtttccatggaaggaatcgtcatgtaatgaatacccgctcgccgcttttatttgccgccgttcaacgcggcgcaatgccgcgcgccttttgatggttcatcctctgcaaaagaccctattgtgctacctggcttccatcagcgcgccatgcgcccggacggaggtgcgcggtaagttgtgctatgctcgtaacgcaaagaagcattcatcttaaagttcgtgtaccatgttcgcccacgcgagaaggcgtgtctctgttatgtctgctgtagcaacatagataacggcacgcgctgatgcaaaaaaattttacagaacagggtgttaggtttcattttgcctcgcgccctgtttttcgaagtataccagacgcctgggaaggcgacaccttaaggaagctcaatgagcgagaaattacaaaaagtgctggcccgcgctggccatggctcccgccgtgaaatcgaagccaaaatcgaagctggccgcgtcagcgtcgatggcaaaatcgccacgcttggcgatcgcgttgaaattgtcccgggtttaaaaattcgcatcgacggtcatctgatttcggtgaaagagtctgcggaacagatttgtcgcgtgctggcttactacaagccggaaggcgaactctgtacccgtaacgacccggaagggcgaccgacggtgttcgatcgtctgccaaagctgcgcggcgcgcgctggattgccgtcggtcgtcttgacgtcaacacctgcggcctgctgctgtttaccaccgacggtgaactggcgaaccgcctgatgcacccgagccgcgaagtggaacgtgaatacgcggtgcgcgtatttggccagatagatgatgacaagctgcgccagctctctcgcggcgtgcagctggaagacggcccggcggcgttcaaaaccatcaagtttaccggtggcgaagggattaaccagtggtacaacgtcacgctgaccgaaggccgtaaccgcgaagttcgccgcctgtgggaagccgttggcgtacaggtcagccgcctgatccgcgtgcgctacggcgatattctgctgccgaaaggcctgccgcgcggcggctacaccgagctggacctggcgcaaaccaactacctgcgcgaactggttgagcttacgccggaaaccacctctaaggtcgccgtcgaaaaggatcgccgtcgcatgaaggcgaatcagattcgccgcgcggttaagcgccacagccaggtgagcaataataataacaaccgtcgttccagcagccgtaataacggtaacggttaattattccagttccggcggtcaccgccggaattctccctcctgtgactcctttcacacttctgcataaagacaaaaaacaggaaatgcccggacaaataacgcaaagcggtgcgccaggcgacgccatatactgaggccactgattacattaacaggtagcctaaaatggaaacagcaggaaaactttcggcaagctatgtggttatcggcgttaaagaaaaaatagggtatggttttggcgatttcgcttctaatttatccttcggcttcgtttctctgtttttactttttttctataccaatatttacggcattagcgccgtacaggcgagcctgatctttgttattgcccgcgtggttgatgcggcctttaatattctgattggttttgccatcgataaaacccacagccgctacggtaagcttcgtccctggttgttgtatggttcaattccgctcggcttcttaacggtgctctgctttgtgcctttcggcggtgaggcgaaattctacttcgcactgatttcctatactatttattgcctggcctatacggcggtaaatacgccttattcggcgctgaccaaccgtttaacccagcatgaagcctcccgctcatcgctgtcggtataccggtttgtcctggcgattgttggctatctgattgtgtccactaccgcggacaggctgatttccccgtttagcgataagcagctgggatacgtcttcgccgtctcttgctttgcgctgctggcgacgtttttgttccttgcctgcttcgggatgaccaaagagcgcgttggtgaagaagaggaagagactccggcgccaacgctgcgggaaatgttgaaggcggtggcaggcaacgcgccgctaattaacctctccatgttcaccgtctttttttatattgcctataccgtgtggatggcgatcgctatttactttatcaaatatataattggtagcgaaggttttacttccaccttctttatgattcagtcggcggcttatattgtcggtaccgttatttcggaaaaaatcattgcgctgattggtaaaaagaaaatgacgctggtggcgctgttgatcggcattgcgggcgtactgatgcaatattttatcgctggcgacaatatctggctgatcatgaccggcgtgtgtctgtacagtattacgctggggatgggttttgtttcaatgtggtcaatgattgccgataccgtggaatatgccgagtggcaccatggggtgcgcaccgaaggcgcaatttacggtttctttaatttcatcaccaaaatagcgatggccatcggcggcggctgtgcgggctggatgctggactattaccactatgacgcgggcaacattaccgccagcgcgattaacggcattaacgtactgatgacgctatttcccggcgcgatgtttgccctcagcgcactgtttgtcgcctgctattcgctggatgaaaaaacctatcgcgatattgtgcaaaaaatcagcctgcgcaaacagaacgcgctttaacctcagggagccagagagatgaataacgattttaacaccaccctcgccgcgatgagcgcggaagaaaaagtggcgctgctgaccggcagcggcctgtggcggacggcctcgctgccgcagcacggtatcgaagatatcattatgaccgacggcacctacggcgtgcgctacagcagcgcgcagattgatggccgggaaaagtggagcatggatgattttatctcggtcatcacccaaaccgcagatcaggccagtgcggaagagcccgccgcgaaaggggggagtgaagcgctattcagcacttcgctaccggcgacctgttttcctaatggttccagcctggcctgcagctgggacgtggagctggtgcatcagatgggggaagcgctggggcgggagtgtcagcaaatgggcgtcgggatcctgctcgggccggggattaacattcgccgtacgccgctggccgggcgaggctatgaatattacgccgaagatccggtggtcagcggcgatattgccgctgcgctgatcaacggcctgcagcaggagggggttggcgccagcctgaaacactttgcggcgaacaactcggagtaccgccgcacggaaatggattcgattattgaagaacgggcgctgcgggaaatctatctggcgggtttccagcgcgcgattgcgaaatcccggccgtggacggtgatgtcttcctacaatcgtcttaacggcgtgcaaacctcccaggatccgtttttgctcacccaggttttgcgcgatgagtggggatatgaagggctggtgatgtccgactggtacggtattaaagatcgccccgcatcgctgatggcgggtaacgatctggcgatgcccgaaacccgccgcgataaacaaactctgctggcggcgattgaagccggagaggtgccgatggaggtggtggaccgcgcctgtctccgcatgctggaactgctcgacaaggtccagcgccatcgccgcccgcaaacgcgagccgattttatggcgcaccacgcgctggcgcagcggcttgccggtgaatccattgtcttgctgaaaaatgaagataatctgctgccgctgcgtccggagaaaacgccgcgcgtcgcggtgctgggtaaaccggctcaggagccggtgatccaggggtccggatgcgcgaccacggtgccgtatctgctcgatcggccgctggatgaaattttcgacctcgccggcgacgacttcagcgtctcctgggccgtgggcgcgccggacgatctgcgctgcgatgaacaggcgctggcgcaggcctgccgcgtcgcgcaggaagccgacgtggcggtgatcttcgtcagcaccgccgtaggcgaagatggcgagaacggcgatcgtcaggatctgcatattctgccggtgcacgaacggttaattcgcgaagtggcgacggtccagccgaatatcgtggtggtgctggcgaatagcgatgcggtggtgatgccgtggctcggcgagtgcaaagcgctgctggaaacgttctttgccgggcaagggatggggcgcgcggtggcggaaatcctcttcggccagcgtaacccctgcggcaaactgacggtaacggtacctaattccctggaggaaacgccggcctggctgcactatccgggcgaaaacctgcgtcatcattacggagaagggctttttgtcggctatcgctattatgataaacgtcgcatgacgccgcagtttccgtttggctttggcttaagctatacccggtttgcgtacgataatatcgcgctgtcagcctgccgtgcaggcgcaggcgagacgcttaccgtgtcgttcgacctgaccaactgcggagagtatgcgggcaaagagatcgtccagctgtacgttagcgcgccgaagggggagctgattcgcgaagtgcagtcattaaaagcgttcagcaaagtggcgctggccgccggagagacccgtcgcgtgagcctgcagctgcccattggcgagctggcctgctatcatccgggcctgggtgattgggtcgtgacgccgggcatctggcaggttcgcgtcggcgcctcatcccgggatctgccgttgatcgcggagattgaggtagattgtccgcagcggtacgtcccgctgcgcgatgataactctctacaacagctgatccagcagccggaggcctttgcccgcgtagtgaagctgattgccgataagagccagatgccggcggagcaggtgcgtgaaaaactgattcgcctggcgccggatctgttctgcgggctgctgattgcgctgaccgaattcctggcgctggatatcgaacgcgacgagcttaacgccgtgctggccggcgctcatcattgccaatgacaggagagtgcgcatgtttcctttttcagtgactcaccctcgttcggtcacccagagcggacgacaaacggcgaacagcggctacgagctgattgcctttgacgcggagaagctgaacgtgtttgccgcggaggttcgctactgcgagcctcactggcatccggctccggagctgattaccgtgctggcggggcgatttacccttgtcgtcggccagcaaagcctggagctggcgcagggagacatgctgtatatcaatgccgaagaggtccattcgctgagcgccgaggaggcgggcagccagctgctcaccgtacagttttcacccggcctgtttgatgaacttcatccctcgccgcagctggactggagtacctgcggacgaccttactctccggcagacagcgaggtacgccagcggctggcgaggctactggaacagctgatcgataaccacgcgccgtttcagcgtatcgcggcgatttatctgctgctggatgcggtcgtctccgcaggcaagccgacgcggcgcgccgaaagctcgctgcgcgacgaggcgatgatcaaaaaaggcattgattttatcaatcaacactttgatcagccgctgacgctgagcgaggtcgcctgccatagcgggatgagctactcgtggttctcgcggctgttcaaaaaggtgagccggtataattttaaagagtatctgacgctggtgcggctaaataaagcccgcaccctgctgcgcgatacccgcactcccatcacggagattagccacagctgcggctttcaggaacacaagtatctgatcgccgcctttaataaatactgcggcgtcacgccaaccgaataccgcaagcgcttcgtctcgcggcaaaatatgcgcgaaagcgaactggcgcagggggaggattgcctatgcctgccgctgaatcatgcgctgctcgagcggctggcggctagtagtcgatccccatctgcgctttgattccggcgtcaaaggcgtgcttcaccggacgcagctcgctgacggtatcggccagttcggtaatctcacggtggcagccgcggccggtaataatcaccgtctggtgcgccgggcggttgcgcagcgcggtaagcacctcttccagcggcaggtaatcataagccaccatgtaggttagctcgtccagcaaaacgaggtcgaggctttcatcagccagcatgcggcgcccgtgctcccagaccgcgaggcaggcggcggtgtcgctttcgcgatcctgcgtattccaggtaaagccggtcgccatcacctgaaactcaacgccgtgcggctcaagaaggttgcgctcgccgtttggccaggtacctttaataaactgtacgacggcggcttttttaccgtgtccgacggcgcgggtgacggtgccaaaagcggcggtggttttgcctttaccgttgccggtaaagacgatcacgatgccgcgctcttcctgcgcggcggcgacgcgagcgtcaactttatcttttacccgctgctggcgttcgcggtggcgttcatcactcattgtgcgattcctggtttgcggcccggctgggcgtcaaaggtcattcccgttttgcgacgactgtcgtcgcccatcagccacaggtaaaccggcatgatatcagcgggggttttcaatttttgcggatcttccgtcgggaacgcattggcgcgcattttggtgcgggtgccgcctgggttaatgcagttgacccgcagatgacggttctgatactcctcggccagcacctgcatcatgccctcagtggcgaatttcgacgcggcgtaagcgccccagttcgcgcgtccctggcggccgacgctggaagaggtaaagaccagcgaacccgattcggatttaagtaataaaggaagcagcgcctgggtgagcataaaggtgccgttcacgttcacctgcatcacctgctgccatacttccggcttttgttgatccatcgggcacacgtcgcccaacagacccgcgttgtgcagcaccccgtcgaggcgcgggtagtggatggctattttctgcgccagctgctggcactcctgcggcgtgcaggttaacaggtcgagagtaaaccagcgggcgggaatgccgcccgcctgctgtatttcgtgcgcgacgctgcgcagcttttcttcattgcggccgaccaggataacgctggcgctatagcgggaataggtcagggcggcttcacggccaatgccgtcgctggcgccggtaaccaggatgatgcggtcctgtaacaggtgacgttgcggttgatagtgcacggcgactcctcgggcgatctgctgacgatcgcgcttgctgttcggtatctcacttttgcgctttatgcctgaaagcgcccgctattgcaatcggcgaagcggaaactcttcgcggaattaatatcttgcaacgatttcatcgtcgctgaaaaaaacaggaaggcgcctcgcgtgcgacacaaagcacaaagacttctcgccgacggctgatgtacactgtgcgccaacgtcagcggtttacacaaggtgaaaacgtggaattacttgctcaatatggcctgtttttggccaaaatcgcgaccatcgttgtcgcaattgcggttatcgtcgccattattgttaacctgactcagcgcaaaaaacagcgcggcgagctgcgggtcaccaatcttagcgagcaatataaggagatgaaggaagagctggcggtttcgttgctcgatgggccgcagcagaagctgtggcataaagcgcaaaagaaaaagctcaagcaggaagcaaaggcgtcaaaggcgcgggcgaagctcggcacaccagagccggacgtcaaaccgcgcgtctgggtgctggattttaaaggcagtatggatgcccatgaagtcagcagcctgcgcgaagaaatcaccgccgttctggcggcggcaaaagcgcgcgaccaggtcgtcattcgccttgaaagcccaggcggcgtggttcacggttacggcctggcggcttcacagctacagcgcctgcgcgacaagcagatcccgttaacggtcgcggtcgataaagtcgcggccagcggcggctatatgatggcctgcgtggcgaacagaatcgtcagtgcaccctttgctatcctgggctctattggcgttgtggcgcaaattcccaacatcaatcgcttcctgaaaaataaagatatcgacattgagctgcatacggccgggcagtacaaacgcaccctgacgatgctgggtgaaaatacagaagaagggcggcagaaatttcgcgaagacctcaacgatactcatcggctgtttaaagattttgtccaccagatgcgccctgggctggatatcgagcaggtagcgacgggtgaacactggtacggcgttcaggcgctggaaaaaggccttgtggacgcggtggaaaccagcgatgaacttctgctggggctgatggataagcacgaggttatcagcgtgcgctatcagcagcgtaagaaaatgctcgagcggtttaccggcagcgcggcggaaagcgccgataagcttctgctgcgctggtggcagcgcgggcaaaagccgctgatgtaaacaaacaacgcgaggcttcggcctcgcgttgttgtcatggccctgcaggcagcggttaatccgccaggtgatacttatcagacagctcgtgtgcgaggtatttaaacatattaaataccgccgtactcttcgccgttggcagaccctgctcgtcaagatagaactcgccgctgaacaccagtacgccgttacgctgaacgacgtcggtggcctcgatcccggctaacgtatcttcatgttcgcgaatgagtttgttggctttttccagaagcgtctggcgatcgatgggttgggttgtaccttgcataaatgcctcctgtgtttcttcgcggctagtctacgccgcgcggcggcgaggggcaaattttccattgatcttgcaggggtaatcgcagaagcctaataaacatcagtttagtggcgggatttgcttttgcatgctaataaagttgcgtaacgaattttatcaggtacagtgtgacgctttcagcgatctggcaacagatttgcttgacattcggccaaaaattattcgtgctatgtcgcctggcgagaaaaagccagcaaactcagctatctggttttatggatgcgaaaccggtgcaaggggttgatatccatcgataacgacgcaacataggttgtgacgtgtcgccagtggatggtgaatcaatgtgcgatgtattcctggatgaatcaaattaggtaaaggtgaatatgggtaaagctctcgttatcgttgagtccccggcaaaagccaaaacgatcaataagtatctgggtaatgactacgtggttaagtccagcgtcggtcatatccgcgatttgccgaccagtggctcagcttccaaaaagagcgccgactctacctccaccaaaggggctaaaaagcctaagaaggatgaacgcggcgctctggtcaaccgtatgggcgtggacccgtggcatgactggaatgcgcactatgaaatactcccgggtaaagaaaaggtcgtttctgaactcaaacagctggcggaaaaagctgaccacatctatctcgcaaccgaccttgaccgcgaaggggaagccatcgcatggcacctgcgggaagttatcggcggtgatgaacagcgctatagccgcgtggtgttcaacgagatcacgaagaatgcgattcgtcaggctttcgaaaagccgggcgaactgaatattgaccgtgtcaacgctcagcaggcgcgccgttttatggatcgcgtggtgggctacatggtctctccactgctgtggaaaaaaattgcccgcggtctgtcagcaggccgcgtccagtcggttgcggtgcgtctggtggtcgagcgcgagcgcgaaattaaagcgttcgttccggaagagtactgggaagttgacgccagcaccacgacccctggcggcgatgcgttaccgctgcaggtcacgcataacggcgataagccgttccgtccggtaaaccgtgatgaaaccatggcggcggtcgcgctgcttgagaaagccagctacagcgtgctggagcgtgaagataagccgaccagcagcaagccgggcgcgccgtttatcacctccacgctgcagcaggccgccagcacgcgtcttggcttcggcgtgaagaaaaccatgatgatggcgcagcgtctctacgaagcgggccacattacctatatgcgtaccgactcgacgaacctgagccaggacgcgctgagcatggtgcgcggctacattggcgacaacttcggtaagaaatatctgccggagagcgcgaatcagtacgccagcaaagaaaactcgcaggaagcgcacgaggcgattcgtccatccgacgtcaacgtgctggccgaaacgttaaaagatatggaatctgatgcgcagaaactgtatcagctgatctggcgccagtttgtcgcctgtcagatgacgcctgcgcagtacgactccaccacgctgacggtgaaagccggcgatttcaaactgaaagcccgcggccgtacgctgcgctttgacggctggaccaaagtaatgccagccctgcgtaaaggcgatgaagaccgtactttaccgatggtcaataagggcgacagcctgagcctggtcgagctgacccctgcgcagcactttaccaagccgccggcgcgttttagcgaagcctcgctggttaaagagctggaaaaacgcggcatcggtcgtccgtccacctatgcgtcgatcatttcgaccattcaggatcgcggctacgtgcgggtggaaaaccgccgcttctatgcggaaaagatgggcgaaatcgtcaccgatcgtctggaagagaacttccgcgatctgatgaactatgatttcaccgcgcagatggaagaccgcctcgatcaggtggctaaccatcaggccgagtggaagcaggtcctcgacagcttcttcggagactttacctcgcagctgcagacggcagagaaagatccggaagagggcggcatgcagccgaacccaatggtgctgaccaccatcgactgcccaacctgcgggcgcaagatggggatccgtaccgccagcaccggcgtattcctcggctgctcgggctacgcgctgtcgccaaaagagcgctgtaaaaccaccattaacctggtgccggaaaacgaagtgctcaacgtgctggaaggcgatgacgctgaaaccaacgcgctgcgcgctaaacgccgctgtaaaaaatgcggcacggcgatggacagctacctcatcgatccgaagcgcaagctgcacgtctgcggtaataacccgacctgcgatggctacgagatcgaagagggcgagttccgcatcaagggctatgacggcccgatcgttgagtgtgaaaaatgtggctccgaaatgcacctgaagatggggcgttttggtaagtatatggcctgcaccaacgacgagtgtaaaaacacccgtaagatcctgcgtaacggggaagtggcgccgccgaaagaagatccggtgccgctgccggagctgccgtgcgagaaatcggacgcctactttgttctgcgcgatggcgcggcgggcgtcttcctggccgccaacaccttcccgaaatcgcgcgaaacc
